United States Patent Application Publication US 2026/0345660 A1, published November 5, 2026 (application 19/552,819).

The application's sequence listing, which the Patent Office published only in electronic form, follows.

SEQUENCE LISTING (1293 sequences)

SEQ ID NO: 1 - DNA, 72 bp, Homo sapiens
  source 1..72: mol_type = genomic DNA
gggggtatagctcagtggtagagcgcgtgcttagcatgcacgaggtcctgggttcgatccccagtacctcca

SEQ ID NO: 2 - DNA, 73 bp, Homo sapiens
  source 1..73: mol_type = genomic DNA
ggggaattagctcaagtggtagagcgcttgcttagcacgcaagaggtagtgggatcgatgcccacattctcca

SEQ ID NO: 3 - DNA, 73 bp, Homo sapiens
  source 1..73: mol_type = genomic DNA
ggggaattagctcaaatggtagagcgctcgcttagcatgcgagaggtagcgggatcgatgcccgcattctcca

SEQ ID NO: 4 - DNA, 73 bp, Homo sapiens
  source 1..73: mol_type = genomic DNA
ggggaattagctcaagtggtagagcgcttgcttagcatgcaagaggtagtgggatcgatgcccacattctcca

SEQ ID NO: 5 - DNA, 73 bp, Homo sapiens
  source 1..73: mol_type = genomic DNA
ggggaattagctcaagcggtagagcgcttgcttagcatgcaagaggtagtgggatcgatgcccacattctcca

SEQ ID NO: 6 - DNA, 73 bp, Homo sapiens
  source 1..73: mol_type = genomic DNA
ggggaattagctcaagtggtagagcgcttgcttagcatgcaagaggtagtgggatcaatgcccacattctcca

SEQ ID NO: 7 - DNA, 73 bp, Homo sapiens
  source 1..73: mol_type = genomic DNA
ggggaattagctcaagtggtagagcgctcgcttagcatgcgagaggtagtgggatcgatgcccgcattctcca

SEQ ID NO: 8 - DNA, 73 bp, Homo sapiens
  source 1..73: mol_type = genomic DNA
ggggaattagcccaagtggtagagcgcttgcttagcatgcaagaggtagtgggatcgatgcccacattctcca

SEQ ID NO: 9 - DNA, 72 bp, Homo sapiens
  source 1..72: mol_type = genomic DNA
gggggtgtagctcagtggtagagcgcgtgcttagcatgcacgaggccccgggttcaatccccggcacctcca

SEQ ID NO: 10 - DNA, 72 bp, Homo sapiens
  source 1..72: mol_type = genomic DNA
gggggtgtagctcagtggtagagcgcgtgcttagcatgtacgaggtcccgggttcaatccccggcacctcca

SEQ ID NO: 11 - DNA, 72 bp, Homo sapiens
  source 1..72: mol_type = genomic DNA
ggggatgtagctcagtggtagagcgcatgcttagcatgcatgaggtcccgggttcgatccccagcatctcca

SEQ ID NO: 12 - DNA, 72 bp, Homo sapiens
  source 1..72: mol_type = genomic DNA
gggggtgtagctcagtggtagagcgcgtgcttagcatgcacgaggccctgggttcaatccccagcacctcca

SEQ ID NO: 13 - DNA, 72 bp, Homo sapiens
  source 1..72: mol_type = genomic DNA
gggggtatagctcagcggtagagcgcgtgcttagcatgcacgaggtcctgggttcaatccccaatacctcca

SEQ ID NO: 14 - DNA, 72 bp, Homo sapiens
  source 1..72: mol_type = genomic DNA
gggggtgtagctcagtggtagagcgcgtgcttagcatgcacgaggccccgggttcaatccctggcacctcca

SEQ ID NO: 15 - DNA, 73 bp, Homo sapiens
  source 1..73: mol_type = genomic DNA
gggggattagctcaaatggtagagcgctcgcttagcatgcgagaggtagcgggatcgatgcccgcatcctcca

SEQ ID NO: 16 - DNA, 73 bp, Homo sapiens
  source 1..73: mol_type = genomic DNA
ggggaattagctcaggcggtagagcgctcgcttagcatgcgagaggtagcgggatcgacgcccgcattctcca

SEQ ID NO: 17 - DNA, 72 bp, Homo sapiens
  source 1..72: mol_type = genomic DNA
ggggatgtagctcagtggtagagcgcatgcttcgcatgtatgaggtcccgggttcgatccccggcatctcca

SEQ ID NO: 18 - DNA, 72 bp, Homo sapiens
  source 1..72: mol_type = genomic DNA
ggggatgtagctcagtggtagagcgcatgcttcgcatgtatgaggccccgggttcgatccccggcatctcca

SEQ ID NO: 19 - DNA, 72 bp, Homo sapiens
  source 1..72: mol_type = genomic DNA
ggggatgtagctcagtggtagagcgcgcgcttcgcatgtgtgaggtcccgggttcaatccccggcatctcca

SEQ ID NO: 20 - DNA, 72 bp, Homo sapiens
  source 1..72: mol_type = genomic DNA
gggggtgtagctcagtggtagagcgcgtgcttcgcatgtacgaggccccgggttcgacccccggctcctcca

SEQ ID NO: 21 - DNA, 72 bp, Homo sapiens
  source 1..72: mol_type = genomic DNA
gggggtgtagctcagtggtagagcgcatgctttgcatgtatgaggtcccgggttcgatccccggcacctcca

SEQ ID NO: 22 - DNA, 72 bp, Homo sapiens
  source 1..72: mol_type = genomic DNA
ggggatgtagctcagtggtagagcgcatgctttgcatgtatgaggtcccgggttcgatccccggcatctcca

SEQ ID NO: 23 - DNA, 72 bp, Homo sapiens
  source 1..72: mol_type = genomic DNA
ggggatgtagctcagtggtagagcgcatgctttgcatgtatgaggccccgggttcgatccccggcatctcca

SEQ ID NO: 24 - DNA, 72 bp, Homo sapiens
  source 1..72: mol_type = genomic DNA
ggggatgtagctcagtggtagagcgcatgctttgcacgtatgaggccccgggttcaatccccggcatctcca

SEQ ID NO: 25 - DNA, 72 bp, Homo sapiens
  source 1..72: mol_type = genomic DNA
gggggtgtagctcagtggtagagcgcatgctttgcatgtatgaggcctcgggttcgatccccgacacctcca

SEQ ID NO: 26 - DNA, 72 bp, Homo sapiens
  source 1..72: mol_type = genomic DNA
gggggtgtagctcagtggtagagcacatgctttgcatgtgtgaggccccgggttcgatccccggcacctcca

SEQ ID NO: 27 - DNA, 71 bp, Homo sapiens
  source 1..71: mol_type = genomic DNA
gggggtgtagctcagtggtagagcgcatgctttgcatgtatgaggcctcggttcgatccccgacacctcca

SEQ ID NO: 28 - DNA, 73 bp, Homo sapiens
  source 1..73: mol_type = genomic DNA
gggccagtggcgcaatggataacgcgtctgactacggatcagaagattccaggttcgactcctggctggctcg

SEQ ID NO: 29 - DNA, 73 bp, Homo sapiens
  source 1..73: mol_type = genomic DNA
gggccagtggcgcaatggataacgcgtctgactacggatcagaagattctaggttcgactcctggctggctcg

SEQ ID NO: 30 - DNA, 73 bp, Homo sapiens
  source 1..73: mol_type = genomic DNA
ggccgcgtggcctaatggataaggcgtctgattccggatcagaagattgagggttcgagtcccttcgtggtcg

SEQ ID NO: 31 - DNA, 73 bp, Homo sapiens
  source 1..73: mol_type = genomic DNA
gacccagtggcctaatggataaggcatcagcctccggagctggggattgtgggttcgagtcccatctgggtcg

SEQ ID NO: 32 - DNA, 73 bp, Homo sapiens
  source 1..73: mol_type = genomic DNA
gccccagtggcctaatggataaggcactggcctcctaagccagggattgtgggttcgagtcccacctggggta

SEQ ID NO: 33 - DNA, 73 bp, Homo sapiens
  source 1..73: mol_type = genomic DNA
gccccagtggcctaatggataaggcactggcctcctaagccagggattgtgggttcgagtcccacctggggtg

SEQ ID NO: 34 - DNA, 73 bp, Homo sapiens
  source 1..73: mol_type = genomic DNA
gccccggtggcctaatggataaggcattggcctcctaagccagggattgtgggttcgagtcccacccggggta

SEQ ID NO: 35 - DNA, 73 bp, Homo sapiens
  source 1..73: mol_type = genomic DNA
gccccagtggcctaatggataaggcattggcctcctaagccagggattgtgggttcgagtcccatctggggtg

SEQ ID NO: 36 - DNA, 73 bp, Homo sapiens
  source 1..73: mol_type = genomic DNA
gccccagtggcctgatggataaggtactggcctcctaagccagggattgtgggttcgagttccacctggggta

SEQ ID NO: 37 - DNA, 73 bp, Homo sapiens
  source 1..73: mol_type = genomic DNA
ggccgcgtggcctaatggataaggcgtctgacttcggatcagaagattgcaggttcgagtcctgccgcggtcg

SEQ ID NO: 38 - DNA, 73 bp, Homo sapiens
  source 1..73: mol_type = genomic DNA
gaccacgtggcctaatggataaggcgtctgacttcggatcagaagattgagggttcgaatccctccgtggtta

SEQ ID NO: 39 - DNA, 73 bp, Homo sapiens
  source 1..73: mol_type = genomic DNA
gaccgcgtggcctaatggataaggcgtctgacttcggatcagaagattgagggttcgagtcccttcgtggtcg

SEQ ID NO: 40 - DNA, 73 bp, Homo sapiens
  source 1..73: mol_type = genomic DNA
gaccacgtggcctaatggataaggcgtctgacttcggatcagaagattgagggttcgaatcccttcgtggtta

SEQ ID NO: 41 - DNA, 73 bp, Homo sapiens
  source 1..73: mol_type = genomic DNA
gaccacgtggcctaatggataaggcgtctgacttcggatcagaagattgagggttcgaatcccttcgtggttg

SEQ ID NO: 42 - DNA, 73 bp, Homo sapiens
  source 1..73: mol_type = genomic DNA
ggccgtgtggcctaatggataaggcgtctgacttcggatcaaaagattgcaggtttgagttctgccacggtcg

SEQ ID NO: 43 - DNA, 85 bp, Homo sapiens
  source 1..85: mol_type = genomic DNA
ggctccgtggcgcaatggatagcgcattggacttctagaggctgaaggcattcaaaggttccgggttcgagtcccggcggagtcg

SEQ ID NO: 44 - DNA, 88 bp, Homo sapiens
  source 1..88: mol_type = genomic DNA
ggctctgtggcgcaatggatagcgcattggacttctagtgacgaatagagcaattcaaaggttgtgggttcgaatcccaccagagtcg

SEQ ID NO: 45 - DNA, 91 bp, Homo sapiens
  source 1..91: mol_type = genomic DNA
ggctctgtggcgcaatggatagcgcattggacttctagctgagcctagtgtggtcattcaaaggttgtgggttcgagtcccaccagagtcg

SEQ ID NO: 46 - DNA, 86 bp, Homo sapiens
  source 1..86: mol_type = genomic DNA
ggctctgtggcgcaatggatagcgcattggacttctagatagttagagaaattcaaaggttgtgggttcgagtcccaccagagtcg

SEQ ID NO: 47 - DNA, 74 bp, Homo sapiens
  source 1..74: mol_type = genomic DNA
gtctctgtggcgcaatggacgagcgcgctggacttctaatccagaggttccgggttcgagtcccggcagagatg

SEQ ID NO: 48 - DNA, 87 bp, Homo sapiens
  source 1..87: mol_type = genomic DNA
ggctctgtggcgcaatggatagcgcattggacttctagcctaaatcaagagattcaaaggttgcgggttcgagtccctccagagtcg

SEQ ID NO: 49 - DNA, 74 bp, Homo sapiens
  source 1..74: mol_type = genomic DNA
gtctctgtggcgcaatcggttagcgcgttcggctgttaaccgaaaggttggtggttcgatcccacccagggacg

SEQ ID NO: 50 - DNA, 74 bp, Homo sapiens
  source 1..74: mol_type = genomic DNA
gtctctgtggcgcaatcggctagcgcgtttggctgttaactaaaaggttggcggttcgaacccacccagaggcg

SEQ ID NO: 51 - DNA, 74 bp, Homo sapiens
  source 1..74: mol_type = genomic DNA
gtctctgtggtgcaatcggttagcgcgttccgctgttaaccgaaagcttggtggttcgagcccacccagggatg

SEQ ID NO: 52 - DNA, 74 bp, Homo sapiens
  source 1..74: mol_type = genomic DNA
gtctctgtggcgcaatcggctagcgcgtttggctgttaactaaaaagttggtggttcgaacacacccagaggcg

SEQ ID NO: 53 - DNA, 74 bp, Homo sapiens
  source 1..74: mol_type = genomic DNA
gtctctgtggcgcaatcggttagcgcgttcggctgttaaccgaaaggttggtggttcgagcccacccagggacg

SEQ ID NO: 54 - DNA, 74 bp, Homo sapiens
  source 1..74: mol_type = genomic DNA
gtctctgtggcgcaatcggttagcgcattcggctgttaaccgaaaggttggtggttcgagcccacccagggacg

SEQ ID NO: 55 - DNA, 74 bp, Homo sapiens
  source 1..74: mol_type = genomic DNA
gtctctgtggcgcaatcggttagcgcgttcggctgttaaccgaaagattggtggttcgagcccacccagggacg

SEQ ID NO: 56 - DNA, 74 bp, Homo sapiens
  source 1..74: mol_type = genomic DNA
gtctctgtggcgcaatcggttagcgcgttcggctgttaactgaaaggttggtggttcgagcccacccagggacg

SEQ ID NO: 57 - DNA, 74 bp, Homo sapiens
  source 1..74: mol_type = genomic DNA
gtctctgtggcgcaatgggttagcgcgttcggctgttaaccgaaaggttggtggttcgagcccatccagggacg

SEQ ID NO: 58 - DNA, 74 bp, Homo sapiens
  source 1..74: mol_type = genomic DNA
gtctctgtggcgtagtcggttagcgcgttcggctgttaaccgaaaagttggtggttcgagcccacccaggaacg

SEQ ID NO: 59 - DNA, 74 bp, Homo sapiens
  source 1..74: mol_type = genomic DNA
gtctctgtggcgcaatcggctagcgcgtttggctgttaactaaaaggttggtggttcgaacccacccagaggcg

SEQ ID NO: 60 - DNA, 74 bp, Homo sapiens
  source 1..74: mol_type = genomic DNA
gtctctgtggcgcaatcggttagcgcgttcggctgttaactgaaaggttagtggttcgagcccacccggggacg

SEQ ID NO: 61 - DNA, 72 bp, Homo sapiens
  source 1..72: mol_type = genomic DNA
tcctcgttagtatagtggttagtatccccgcctgtcacgcgggagaccggggttcaattccccgacggggag

SEQ ID NO: 62 - DNA, 72 bp, Homo sapiens
  source 1..72: mol_type = genomic DNA
tcctcgttagtatagtggtgagtatccccgcctgtcacgcgggagaccggggttcgattccccgacggggag

SEQ ID NO: 63 - DNA, 72 bp, Homo sapiens
  source 1..72: mol_type = genomic DNA
tcctcgttagtatagtggtgagtgtccccgtctgtcacgcgggagaccggggttcgattccccgacggggag

SEQ ID NO: 64 - DNA, 72 bp, Homo sapiens
  source 1..72: mol_type = genomic DNA
gggggcatagctcagtggtagagcatttgactgcagatcaagaggtccctggttcaaatccaggtgccccct

SEQ ID NO: 65 - DNA, 72 bp, Homo sapiens
  source 1..72: mol_type = genomic DNA
gggggtatagctcaggggtagagcatttgactgcagatcaagaggtccctggttcaaatccaggtgcccccc

SEQ ID NO: 66 - DNA, 72 bp, Homo sapiens
  source 1..72: mol_type = genomic DNA
gggggtatagcttagcggtagagcatttgactgcagatcaagaggtccccggttcaaatccgggtgccccct

SEQ ID NO: 67 - DNA, 72 bp, Homo sapiens
  source 1..72: mol_type = genomic DNA
gggggtatagcttaggggtagagcatttgactgcagatcaaaaggtccctggttcaaatccaggtgcccctt

SEQ ID NO: 68 - DNA, 72 bp, Homo sapiens
  source 1..72: mol_type = genomic DNA
gggggtatagctcaggggtagagcatttgactgcagatcaagaggtccccagttcaaatctgggtgccccct

SEQ ID NO: 69 - DNA, 72 bp, Homo sapiens
  source 1..72: mol_type = genomic DNA
gggggtatagctcaggggtagagcatttgactgcagatcaagaagtccccggttcaaatccgggtgccccct

SEQ ID NO: 70 - DNA, 72 bp, Homo sapiens
  source 1..72: mol_type = genomic DNA
gggggtatagctcaggggtagagcatttgactgcagatcaagaggtctctggttcaaatccaggtgccccct

SEQ ID NO: 71 - DNA, 72 bp, Homo sapiens
  source 1..72: mol_type = genomic DNA
gggggtatagctcaggggtagagcacttgactgcagatcaagaagtccttggttcaaatccaggtgccccct

SEQ ID NO: 72 - DNA, 72 bp, Homo sapiens
  source 1..72: mol_type = genomic DNA
ggggatatagctcaggggtagagcatttgactgcagatcaagaggtccccggttcaaatccgggtgcccccc

SEQ ID NO: 73 - DNA, 72 bp, Homo sapiens
  source 1..72: mol_type = genomic DNA
gggggtatagttcaggggtagagcatttgactgcagatcaagaggtccctggttcaaatccaggtgccccct

SEQ ID NO: 74 - DNA, 72 bp, Homo sapiens
  source 1..72: mol_type = genomic DNA
gggggtatagctcaggggtagagcatttgactgcaaatcaagaggtccctgattcaaatccaggtgccccct

SEQ ID NO: 75 - DNA, 72 bp, Homo sapiens
  source 1..72: mol_type = genomic DNA
gggggtatagctcagtggtagagcatttgactgcagatcaagaggtccccggttcaaatccgggtgccccct

SEQ ID NO: 76 - DNA, 72 bp, Homo sapiens
  source 1..72: mol_type = genomic DNA
gggcgtatagctcaggggtagagcatttgactgcagatcaagaggtccccagttcaaatctgggtgccccct

SEQ ID NO: 77 - DNA, 72 bp, Homo sapiens
  source 1..72: mol_type = genomic DNA
gggggtatagctcacaggtagagcatttgactgcagatcaagaggtccccggttcaaatctgggtgccccct

SEQ ID NO: 78 - DNA, 70 bp, Homo sapiens
  source 1..70: mol_type = genomic DNA
gggcgtatagctcaggggtagagcatttgactgcagatcaagaggtccccagttcaaatctgggtgccca

SEQ ID NO: 79 - DNA, 72 bp, Homo sapiens
  source 1..72: mol_type = genomic DNA
gggggtatagctcacaggtagagcatttgactgcagatcaagaggtccccggttcaaatccggttactccct

SEQ ID NO: 80 - DNA, 72 bp, Homo sapiens
  source 1..72: mol_type = genomic DNA
gggggtatagctcaggggtagagcacttgactgcagatcaagaggtccctggttcaaatccaggtgccccct

SEQ ID NO: 81 - DNA, 72 bp, Homo sapiens
  source 1..72: mol_type = genomic DNA
gggggtatagctcagtggtagagcatttgactgcagatcaagaggtccctggttcaaatccgggtgccccct

SEQ ID NO: 82 - DNA, 73 bp, Homo sapiens
  source 1..73: mol_type = genomic DNA
gggggtatagctcagtgggtagagcatttgactgcagatcaagaggtccccggttcaaatccgggtgccccct

SEQ ID NO: 83 - DNA, 72 bp, Homo sapiens
  source 1..72: mol_type = genomic DNA
gggggtgtagctcagtggtagagcatttgactgcagatcaagaggtccctggttcaaatccaggtgccccct

SEQ ID NO: 84 - DNA, 73 bp, Homo sapiens
  source 1..73: mol_type = genomic DNA
gggggtatagctcaggtggtagagcatttgactgcagatcaagaggtccccggttcaaatccgggtgccccct

SEQ ID NO: 85 - DNA, 72 bp, Homo sapiens
  source 1..72: mol_type = genomic DNA
gggggtatagctcaggggtagagcatttgactgcagatcaagaggtccccggttcaaatccgggtgccccct

SEQ ID NO: 86 - DNA, 72 bp, Homo sapiens
  source 1..72: mol_type = genomic DNA
gggggtatagctcaggggtagagcatttgactgcagatcaagaggtccctggttcaaatccaggtgccccct

SEQ ID NO: 87 - DNA, 72 bp, Homo sapiens
  source 1..72: mol_type = genomic DNA
ggttccatggtgtaatggttagcactctggactctgaatccagcgatccgagttcaaatctcggtggaacct

SEQ ID NO: 88 - DNA, 72 bp, Homo sapiens
  source 1..72: mol_type = genomic DNA
ggttccatggtgtaatggttagcactctggactctgaatccagcgatccgagttcaagtctcggtggaacct

SEQ ID NO: 89 - DNA, 72 bp, Homo sapiens
  source 1..72: mol_type = genomic DNA
ggttccatggtgtaatggtgagcactctggactctgaatccagcgatccgagttcgagtctcggtggaacct

SEQ ID NO: 90 - DNA, 72 bp, Homo sapiens
  source 1..72: mol_type = genomic DNA
ggttccatggtgtaatggtaagcactctggactctgaatccagcgatccgagttcgagtctcggtggaacct

SEQ ID NO: 91 - DNA, 72 bp, Homo sapiens
  source 1..72: mol_type = genomic DNA
ggttccatggtgtaatggttagcactctggactctgaatccggtaatccgagttcaaatctcggtggaacct

SEQ ID NO: 92 - DNA, 72 bp, Homo sapiens
  source 1..72: mol_type = genomic DNA
ggccccatggtgtaatggtcagcactctggactctgaatccagcgatccgagttcaaatctcggtgggaccc

SEQ ID NO: 93 - DNA, 72 bp, Homo sapiens
  source 1..72: mol_type = genomic DNA
ggttccatggtgtaatggtaagcactctggactctgaatccagccatctgagttcgagtctctgtggaacct

SEQ ID NO: 94 - DNA, 72 bp, Homo sapiens
  source 1..72: mol_type = genomic DNA
ggtcccatggtgtaatggttagcactctggactttgaatccagcgatccgagttcaaatctcggtgggacct

SEQ ID NO: 95 - DNA, 72 bp, Homo sapiens
  source 1..72: mol_type = genomic DNA
ggtcccatggtgtaatggttagcactctggactttgaatccagcaatccgagttcgaatctcggtgggacct

SEQ ID NO: 96 - DNA, 72 bp, Homo sapiens
  source 1..72: mol_type = genomic DNA
ggccccatggtgtaatggttagcactctggactttgaatccagcgatccgagttcaaatctcggtgggacct

SEQ ID NO: 97 - DNA, 72 bp, Homo sapiens
  source 1..72: mol_type = genomic DNA
ggtcccatggtgtaatggttagcactctgggctttgaatccagcaatccgagttcgaatcttggtgggacct

SEQ ID NO: 98 - DNA, 72 bp, Homo sapiens
  source 1..72: mol_type = genomic DNA
tccctggtggtctagtggttaggattcggcgctctcaccgccgcggcccgggttcgattcccggtcagggaa

SEQ ID NO: 99 - DNA, 72 bp, Homo sapiens
  source 1..72: mol_type = genomic DNA
tccctggtggtctagtggttaggattcggcgctctcaccgccgcggcccgggttcgattcccggtcaggaaa

SEQ ID NO: 100 - DNA, 72 bp, Homo sapiens
  source 1..72: mol_type = genomic DNA
tcccatatggtctagcggttaggattcctggttttcacccaggtggcccgggttcgactcccggtatgggaa

SEQ ID NO: 101 - DNA, 72 bp, Homo sapiens
  source 1..72: mol_type = genomic DNA
tcccacatggtctagcggttaggattcctggttttcacccaggcggcccgggttcgactcccggtgtgggaa

SEQ ID NO: 102 - DNA, 72 bp, Homo sapiens
  source 1..72: mol_type = genomic DNA
tccctggtggtctagtggctaggattcggcgctttcaccgccgcggcccgggttcgattcccggccagggaa

SEQ ID NO: 103 - DNA, 72 bp, Homo sapiens
  source 1..72: mol_type = genomic DNA
tccctggtggtctagtggctaggattcggcgctttcaccgccgcggcccgggttcgattcccggtcagggaa

SEQ ID NO: 104 - DNA, 71 bp, Homo sapiens
  source 1..71: mol_type = genomic DNA
gcattggtggttcagtggtagaattctcgcctcccacgcgggagacccgggttcaattcccggccaatgca

SEQ ID NO: 105 - DNA, 71 bp, Homo sapiens
  source 1..71: mol_type = genomic DNA
gcgccgctggtgtagtggtatcatgcaagattcccattcttgcgacccgggttcgattcccgggcggcgca

SEQ ID NO: 106 - DNA, 71 bp, Homo sapiens
  source 1..71: mol_type = genomic DNA
gcattggtggttcaatggtagaattctcgcctcccacgcaggagacccaggttcgattcctggccaatgca

SEQ ID NO: 107 - DNA, 71 bp, Homo sapiens
  source 1..71: mol_type = genomic DNA
gcatgggtggttcagtggtagaattctcgcctgccacgcgggaggcccgggttcgattcccggcccatgca

SEQ ID NO: 108 - DNA, 71 bp, Homo sapiens
  source 1..71: mol_type = genomic DNA
gcattggtggttcagtggtagaattctcgcctgccacgcgggaggcccgggttcgattcccggccaatgca

SEQ ID NO: 109 - DNA, 71 bp, Homo sapiens
  source 1..71: mol_type = genomic DNA
gcattggtggttcagtggtagaattctcgcctgccacgcgggaggcccgggtttgattcccggccagtgca

SEQ ID NO: 110 - DNA, 71 bp, Homo sapiens
  source 1..71: mol_type = genomic DNA
gcataggtggttcagtggtagaattcttgcctgccacgcaggaggcccaggtttgattcctggcccatgca

SEQ ID NO: 111 - DNA, 71 bp, Homo sapiens
  source 1..71: mol_type = genomic DNA
gcattggtggttcagtggtagaattctcgcctgccatgcgggcggccgggcttcgattcctggccaatgca

SEQ ID NO: 112 - DNA, 72 bp, Homo sapiens
  source 1..72: mol_type = genomic DNA
gcgttggtggtatagtggttagcatagctgccttccaagcagttgacccgggttcgattcccggccaacgca

SEQ ID NO: 113 - DNA, 72 bp, Homo sapiens
  source 1..72: mol_type = genomic DNA
gcgttggtggtatagtggtgagcatagctgccttccaagcagttgacccgggttcgattcccggccaacgca

SEQ ID NO: 114 - DNA, 72 bp, Homo sapiens
  source 1..72: mol_type = genomic DNA
gcgttggtggtatagtggtaagcatagctgccttccaagcagttgacccgggttcgattcccggccaacgca

SEQ ID NO: 115 - DNA, 72 bp, Homo sapiens
  source 1..72: mol_type = genomic DNA
gcgttggtggtatagtggtgagcatagttgccttccaagcagttgacccgggctcgattcccgcccaacgca

SEQ ID NO: 116 - DNA, 72 bp, Homo sapiens
  source 1..72: mol_type = genomic DNA
gccgtgatcgtatagtggttagtactctgcgttgtggccgcagcaacctcggttcgaatccgagtcacggca

SEQ ID NO: 117 - DNA, 72 bp, Homo sapiens
  source 1..72: mol_type = genomic DNA
gccatgatcgtatagtggttagtactctgcgctgtggccgcagcaacctcggttcgaatccgagtcacggca

SEQ ID NO: 118 - DNA, 74 bp, Homo sapiens
  source 1..74: mol_type = genomic DNA
ggccggttagctcagttggttagagcgtggcgctaataacgccaaggtcgcgggttcgatccccgtacgggcca

SEQ ID NO: 119 - DNA, 74 bp, Homo sapiens
  source 1..74: mol_type = genomic DNA
ggccggttagctcagttggttagagcgtggtgctaataacgccaaggtcgcgggttcgatccccgtactggcca

SEQ ID NO: 120 - DNA, 74 bp, Homo sapiens
  source 1..74: mol_type = genomic DNA
ggctggttagctcagttggttagagcgtggtgctaataacgccaaggtcgcgggttcgatccccgtactggcca

SEQ ID NO: 121 - DNA, 74 bp, Homo sapiens
  source 1..74: mol_type = genomic DNA
ggccggttagctcagttggttagagcgtggtgctaataacgccaaggtcgcgggttcgaaccccgtacgggcca

SEQ ID NO: 122 - DNA, 74 bp, Homo sapiens
  source 1..74: mol_type = genomic DNA
ggccggttagctcagttggttagagcgtggtgctaataacgccaaggtcgcgggttcgatccccgtacgggcca

SEQ ID NO: 123 - DNA, 74 bp, Homo sapiens
  source 1..74: mol_type = genomic DNA
ggccggttagctcagttggttagagcgtggtgctaataacgctaaggtcgcgggttcgatccccgtactggcca

SEQ ID NO: 124 - DNA, 74 bp, Homo sapiens
  source 1..74: mol_type = genomic DNA
ggccggttagctcagttggtcagagcgtggtgctaataacgccaaggtcgcgggttcgatccccgtacgggcca

SEQ ID NO: 125 - DNA, 74 bp, Homo sapiens
  source 1..74: mol_type = genomic DNA
ggccggttagctcagtcggctagagcgtggtgctaataacgccaaggtcgcgggttcgatccccgtacgggcca

SEQ ID NO: 126 - DNA, 74 bp, Homo sapiens
  source 1..74: mol_type = genomic DNA
ggctggttagttcagttggttagagcgtggtgctaataacgccaaggtcgtgggttcgatccccatatcggcca

SEQ ID NO: 127 - DNA, 74 bp, Homo sapiens
  source 1..74: mol_type = genomic DNA
ggccggttagctcagttggtaagagcgtggtgctgataacaccaaggtcgcgggctcgactcccgcaccggcca

SEQ ID NO: 128 - DNA, 93 bp, Homo sapiens
  source 1..93: mol_type = genomic DNA
gctccagtggcgcaatcggttagcgcgcggtacttatatgacagtgcgagcggagcaatgccgaggttgtgagttcgatcctcacctggagca

SEQ ID NO: 129 - DNA, 93 bp, Homo sapiens
  source 1..93: mol_type = genomic DNA
gctccagtggcgcaatcggttagcgcgcggtacttatacagcagtacatgcagagcaatgccgaggttgtgagttcgagcctcacctggagca

SEQ ID NO: 130 - DNA, 94 bp, Homo sapiens
  source 1..94: mol_type = genomic DNA
gctccagtggcgcaatcggttagcgcgcggtacttatatggcagtatgtgtgcgagtgatgccgaggttgtgagttcgagcctcacctggagca

SEQ ID NO: 131 - DNA, 94 bp, Homo sapiens
  source 1..94: mol_type = genomic DNA
gctccagtggcgcaatcggttagcgcgcggtacttatacaacagtatatgtgcgggtgatgccgaggttgtgagttcgagcctcacctggagca

SEQ ID NO: 132 - DNA, 94 bp, Homo sapiens
  source 1..94: mol_type = genomic DNA
gctccagtggcgcaatcggttagcgcgcggtacttataagacagtgcacctgtgagcaatgccgaggttgtgagttcaagcctcacctggagca

SEQ ID NO: 133 - DNA, 82 bp, Homo sapiens
  source 1..82: mol_type = genomic DNA
ggtagcgtggccgagcggtctaaggcgctggattaaggctccagtctcttcggaggcgtgggttcgaatcccaccgctgcca

SEQ ID NO: 134 - DNA, 82 bp, Homo sapiens
  source 1..82: mol_type = genomic DNA
ggtagcgtggccgagcggtctaaggcgctggattaaggctccagtctcttcgggggcgtgggttcgaatcccaccgctgcca

SEQ ID NO: 135 - DNA, 82 bp, Homo sapiens
  source 1..82: mol_type = genomic DNA
ggtagcgtggccgagcggtctaaggcgctggattaaggctccagtctcttcgggggcgtgggttcaaatcccaccgctgcca

SEQ ID NO: 136 - DNA, 82 bp, Homo sapiens
  source 1..82: mol_type = genomic DNA
ggtagcgtggccgagtggtctaagacgctggattaaggctccagtctcttcgggggcgtgggtttgaatcccaccgctgcca

SEQ ID NO: 137 - DNA, 106 bp, Homo sapiens
  source 1..106: mol_type = genomic DNA
gtcaggatggccgagtggtctaaggcgccagactcaagctaagcttcctccgcggtggggattctggtctccaatggaggcgtgggttcgaatcccacttctgaca

SEQ ID NO: 138 - DNA, 105 bp, Homo sapiens
  source 1..105: mol_type = genomic DNA
gtcaggatggccgagtggtctaaggcgccagactcaagcttggcttcctcgtgttgaggattctggtctccaatggaggcgtgggttcgaatcccacttctgaca

SEQ ID NO: 139 - DNA, 108 bp, Homo sapiens
  source 1..108: mol_type = genomic DNA
gtcaggatggccgagtggtctaaggcgccagactcaagcttactgcttcctgtgttcgggtcttctggtctccgtatggaggcgtgggttcgaatcccacttctgaca

SEQ ID NO: 140 - DNA, 107 bp, Homo sapiens
  source 1..107: mol_type = genomic DNA
gtcaggatggccgagtggtctaaggcgccagactcaagttgctacttcccaggtttggggcttctggtctccgcatggaggcgtgggttcgaatcccacttctgaca

SEQ ID NO: 141 - DNA, 106 bp, Homo sapiens
  source 1..106: mol_type = genomic DNA
gtcaggatggccgagtggtctaaggcgccagactcaaggtaagcaccttgcctgcgggctttctggtctccggatggaggcgtgggttcgaatcccacttctgaca

SEQ ID NO: 142 - DNA, 74 bp, Homo sapiens
  source 1..74: mol_type = genomic DNA
gcctccttagtgcagtaggtagcgcatcagtctcaaaatctgaatggtcctgagttcaagcctcagagggggca

SEQ ID NO: 143 - DNA, 84 bp, Homo sapiens
  source 1..84: mol_type = genomic DNA
gtcaggatggccgagcagtcttaaggcgctgcgttcaaatcgcaccctccgctggaggcgtgggttcgaatcccacttttgaca

SEQ ID NO: 144 - DNA, 83 bp, Homo sapiens
  source 1..83: mol_type = genomic DNA
gtcaggatggccgagcggtctaaggcgctgcgttcaggtcgcagtctcccctggaggcgtgggttcgaatcccactcctgaca

SEQ ID NO: 145 - DNA, 83 bp, Homo sapiens
  source 1..83: mol_type = genomic DNA
gtcaggatggccgagcggtctaaggcgctgcgttcaggtcgcagtctcccctggaggcgtgggttcgaatcccacttctgaca

SEQ ID NO: 146 - DNA, 83 bp, Homo sapiens
  source 1..83: mol_type = genomic DNA
accaggatggccgagtggttaaggcgttggacttaagatccaatggacatatgtccgcgtgggttcgaaccccactcctggta

SEQ ID NO: 147 - DNA, 83 bp, Homo sapiens
  source 1..83: mol_type = genomic DNA
accgggatggccgagtggttaaggcgttggacttaagatccaatgggctggtgcccgcgtgggttcgaaccccactctcggta

SEQ ID NO: 148 - DNA, 83 bp, Homo sapiens
  source 1..83: mol_type = genomic DNA
accagaatggccgagtggttaaggcgttggacttaagatccaatggattcatatccgcgtgggttcgaaccccacttctggta

SEQ ID NO: 149 - DNA, 83 bp, Homo sapiens
  source 1..83: mol_type = genomic DNA
accgggatggctgagtggttaaggcgttggacttaagatccaatggacaggtgtccgcgtgggttcgagccccactcccggta

SEQ ID NO: 150 - DNA, 82 bp, Homo sapiens
  source 1..82: mol_type = genomic DNA
ggtagcgtggccgagcggtctaaggcgctggatttaggctccagtctcttcggaggcgtgggttcgaatcccaccgctgcca

SEQ ID NO: 151 - DNA, 82 bp, Homo sapiens
  source 1..82: mol_type = genomic DNA
ggtagtgtggccgagcggtctaaggcgctggatttaggctccagtctcttcgggggcgtgggttcgaatcccaccactgcca

SEQ ID NO: 152 - DNA, 82 bp, Homo sapiens
  source 1..82: mol_type = genomic DNA
ggtagcgtggccgagtggtctaaggcgctggatttaggctccagtcatttcgatggcgtgggttcgaatcccaccgctgcca

SEQ ID NO: 153 - DNA, 73 bp, Homo sapiens
  source 1..73: mol_type = genomic DNA
gcccggctagctcagtcggtagagcatgggactcttaatcccagggtcgtgggttcgagccccacgttgggcg

SEQ ID NO: 154 - DNA, 73 bp, Homo sapiens
  source 1..73: mol_type = genomic DNA
gcccagctagctcagtcggtagagcataagactcttaatctcagggttgtggattcgtgccccatgctgggtg

SEQ ID NO: 155 - DNA, 74 bp, Homo sapiens
  source 1..74: mol_type = genomic DNA
gcagctagctcagtcggtagagcatgagactcttaatctcagggtcatgggttcgtgccccatgttgggtgcca

SEQ ID NO: 156 - DNA, 73 bp, Homo sapiens
  source 1..73: mol_type = genomic DNA
gcccggctagctcagtcggtagagcatgagactcttaatctcagggtcgtgggttcgagccccacgttgggcg

SEQ ID NO: 157 - DNA, 73 bp, Homo sapiens
  source 1..73: mol_type = genomic DNA
gcccggctagctcagtcggtagagcatgagacccttaatctcagggtcgtgggttcgagccccacgttgggcg

SEQ ID NO: 158 - DNA, 73 bp, Homo sapiens
  source 1..73: mol_type = genomic DNA
gcccggctagctcagtcggtagagcatgggactcttaatctcagggtcgtgggttcgagccccacgttgggcg

SEQ ID NO: 159 - DNA, 73 bp, Homo sapiens
  source 1..73: mol_type = genomic DNA
gcccggctagctcagtcgatagagcatgagactcttaatctcagggtcgtgggttcgagccgcacgttgggcg

SEQ ID NO: 160 - DNA, 73 bp, Homo sapiens
  source 1..73: mol_type = genomic DNA
gcccagctagctcagtcggtagagcatgagactcttaatctcagggtcatgggtttgagccccacgtttggtg

SEQ ID NO: 161 - DNA, 73 bp, Homo sapiens
  source 1..73: mol_type = genomic DNA
gcctggctagctcagtcggcaaagcatgagactcttaatctcagggtcgtgggctcgagctccatgttgggcg

SEQ ID NO: 162 - DNA, 73 bp, Homo sapiens
  source 1..73: mol_type = genomic DNA
gcccgactacctcagtcggtggagcatgggactcttcatcccagggttgtgggttcgagccccacattgggca

SEQ ID NO: 163 - DNA, 73 bp, Homo sapiens
  source 1..73: mol_type = genomic DNA
gcctggatagctcagttggtagagcatcagacttttaatctgagggtccagggttcaagtccctgttcaggca

SEQ ID NO: 164 - DNA, 73 bp, Homo sapiens
  source 1..73: mol_type = genomic DNA
acccagatagctcagtcagtagagcatcagacttttaatctgagggtccaaggttcatgtccctttttgggtg

SEQ ID NO: 165 - DNA, 73 bp, Homo sapiens
  source 1..73: mol_type = genomic DNA
gcctggatagctcagttggtagagcatcagacttttaatctgagggtccagggttcaagtccctgttcaggcg

SEQ ID NO: 166 - DNA, 73 bp, Homo sapiens
  source 1..73: mol_type = genomic DNA
gcccggatagctcagtcggtagagcatcagacttttaatctgagggtccagggttcaagtccctgttcgggcg

SEQ ID NO: 167 - DNA, 73 bp, Homo sapiens
  source 1..73: mol_type = genomic DNA
gcctggatagctcagtcggtagagcatcagacttttaatctgagggtccagggttcaagtccctgttcaggcg

SEQ ID NO: 168 - DNA, 73 bp, Homo sapiens
  source 1..73: mol_type = genomic DNA
gcccggatagctcagtcggtagagcatcagacttttaatctgagggtccggggttcaagtccctgttcgggcg

SEQ ID NO: 169 - DNA, 73 bp, Homo sapiens
  source 1..73: mol_type = genomic DNA
gcctgggtagctcagtcggtagagcatcagacttttaatctgagggtccagggttcaagtccctgtccaggcg

SEQ ID NO: 170 - DNA, 73 bp, Homo sapiens
  source 1..73: mol_type = genomic DNA
gcctggatagctcagttggtagaacatcagacttttaatctgacggtgcagggttcaagtccctgttcaggcg

SEQ ID NO: 171 - DNA, 73 bp, Homo sapiens
  source 1..73: mol_type = genomic DNA
gcctcgttagcgcagtaggtagcgcgtcagtctcataatctgaaggtcgtgagttcgatcctcacacggggca

SEQ ID NO: 172 - DNA, 73 bp, Homo sapiens
  source 1..73: mol_type = genomic DNA
gccctcttagcgcagtgggcagcgcgtcagtctcataatctgaaggtcctgagttcgagcctcagagagggca

SEQ ID NO: 173 - DNA, 73 bp, Homo sapiens
  source 1..73: mol_type = genomic DNA
gcctccttagcgcagtaggcagcgcgtcagtctcataatctgaaggtcctgagttcgaacctcagagggggca

SEQ ID NO: 174 - DNA, 73 bp, Homo sapiens
  source 1..73: mol_type = genomic DNA
gccctcttagcgcagcgggcagcgcgtcagtctcataatctgaaggtcctgagttcgagcctcagagagggca

SEQ ID NO: 175 - DNA, 73 bp, Homo sapiens
  source 1..73: mol_type = genomic DNA
gccctcttagcgcagctggcagcgcgtcagtctcataatctgaaggtcctgagttcaagcctcagagagggca

SEQ ID NO: 176 - DNA, 73 bp, Homo sapiens
  source 1..73: mol_type = genomic DNA
gcctcgttagcgcagtaggcagcgcgtcagtctcataatctgaaggtcgtgagttcgagcctcacacggggca

SEQ ID NO: 177 - DNA, 73 bp, Homo sapiens
  source 1..73: mol_type = genomic DNA
gccctcttagtgcagctggcagcgcgtcagtttcataatctgaaagtcctgagttcaagcctcagagagggca

SEQ ID NO: 178 - DNA, 73 bp, Homo sapiens
  source 1..73: mol_type = genomic DNA
gccgaaatagctcagttgggagagcgttagactgaagatctaaaggtccctggttcgatcccgggtttcggca

SEQ ID NO: 179 - DNA, 73 bp, Homo sapiens
  source 1..73: mol_type = genomic DNA
gccgaaatagctcagttgggagagcgttagactgaagatctaaaggtccctggttcaatcccgggtttcggca

SEQ ID NO: 180 - DNA, 73 bp, Homo sapiens
  source 1..73: mol_type = genomic DNA
gccgagatagctcagttgggagagcgttagactgaagatctaaaggtccctggttcaatcccgggtttcggca

SEQ ID NO: 181 - DNA, 74 bp, Homo sapiens
  source 1..74: mol_type = genomic DNA
gccgaaatagctcagttgggagagcgttagaccgaagatcttaaaggtccctggttcaatcccgggtttcggca

SEQ ID NO: 182 - DNA, 74 bp, Homo sapiens
  source 1..74: mol_type = genomic DNA
gctgaaatagctcagttgggagagcgttagactgaagatcttaaagttccctggttcaaccctgggtttcagcc

SEQ ID NO: 183 - DNA, 72 bp, Homo sapiens
  source 1..72: mol_type = genomic DNA
ggctcgttggtctaggggtatgattctcgcttaggatgcgagaggtcccgggttcaaatcccggacgagccc

SEQ ID NO: 184 - DNA, 72 bp, Homo sapiens
  source 1..72: mol_type = genomic DNA
ggctcgttggtctaggggtatgattctcgcttagggtgcgagaggtcccgggttcaaatcccggacgagccc

SEQ ID NO: 185 - DNA, 72 bp, Homo sapiens
  source 1..72: mol_type = genomic DNA
ggctcgttggtctaggggtatgattctcgcttcgggtgcgagaggtcccgggttcaaatcccggacgagccc

SEQ ID NO: 186 - DNA, 72 bp, Homo sapiens
  source 1..72: mol_type = genomic DNA
ggctcgttggtctaggggtatgattctcgcttcgggtgtgagaggtcccgggttcaaatcccggacgagccc

SEQ ID NO: 187 - DNA, 72 bp, Homo sapiens
  source 1..72: mol_type = genomic DNA
ggctcgttggtctagtggtatgattctcgctttgggtgcgagaggtcccgggttcaaatcccggacgagccc

SEQ ID NO: 188 - DNA, 72 bp, Homo sapiens
  source 1..72: mol_type = genomic DNA
ggctcgttggtctaggggtatgattctcggtttgggtccgagaggtcccgggttcaaatcccggacgagccc

SEQ ID NO: 189 - DNA, 72 bp, Homo sapiens
  source 1..72: mol_type = genomic DNA
ggctcgttggtctaggggtatgattctcgctttgggtgcgagaggtcccgggttcaaatcccggacgagccc

SEQ ID NO: 190 - DNA, 87 bp, Homo sapiens
  source 1..87: mol_type = genomic DNA
gcccggatgatcctcagtggtctggggtgcaggcttcaaacctgtagctgtctagcgacagagtggttcaattccacctttcgggcg

SEQ ID NO: 191 - DNA, 84 bp, Homo sapiens
  source 1..84: mol_type = genomic DNA
gctcggatgatcctcagtggtctggggtgcaggcttcaaacctgtagctgtctagtgacagagtggttcaattccacctttgta

SEQ ID NO: 192 - DNA, 82 bp, Homo sapiens
  source 1..82: mol_type = genomic DNA
gtagtcgtggccgagtggttaaggcgatggactagaaatccattggggtttccccgcgcaggttcgaatcctgccgactacg

SEQ ID NO: 193 - DNA, 82 bp, Homo sapiens
  source 1..82: mol_type = genomic DNA
gtagtcgtggccgagtggttaaggcgatggactagaaatccattggggtctccccgcgcaggttcgaatcctgccgactacg

SEQ ID NO: 194 - DNA, 82 bp, Homo sapiens
  source 1..82: mol_type = genomic DNA
gtagtcgtggccgagtggttaaggcgatggactagaaatccattggggtttccccacgcaggttcgaatcctgccgactacg

SEQ ID NO: 195 - DNA, 82 bp, Homo sapiens
  source 1..82: mol_type = genomic DNA
gtagtcgtggccgagtggttaaggtgatggactagaaacccattggggtctccccgcgcaggttcgaatcctgccgactacg

SEQ ID NO: 196 - DNA, 82 bp, Homo sapiens
  source 1..82: mol_type = genomic DNA
gctgtgatggccgagtggttaaggcgttggactcgaaatccaatggggtctccccgcgcaggttcgaatcctgctcacagcg

SEQ ID NO: 197 - DNA, 82 bp, Homo sapiens
  source 1..82: mol_type = genomic DNA
gctgtgatggccgagtggttaaggcgttggactcgaaatccaatggggtctccccgcgcaggttcaaatcctgctcacagcg

SEQ ID NO: 198 - DNA, 82 bp, Homo sapiens
  source 1..82: mol_type = genomic DNA
gctgtgatggccgagtggttaaggtgttggactcgaaatccaatgggggttccccgcgcaggttcaaatcctgctcacagcg

SEQ ID NO: 199 - DNA, 82 bp, Homo sapiens
  source 1..82: mol_type = genomic DNA
gtcacggtggccgagtggttaaggcgttggactcgaaatccaatggggtttccccgcacaggttcgaatcctgttcgtgacg

SEQ ID NO: 200 - DNA, 82 bp, Homo sapiens
  source 1..82: mol_type = genomic DNA
gacgaggtggccgagtggttaaggcgatggactgctaatccattgtgctctgcacgcgtgggttcgaatcccaccctcgtcg

SEQ ID NO: 201 - DNA, 82 bp, Homo sapiens
  source 1..82: mol_type = genomic DNA
gacgaggtggccgagtggttaaggcgatggactgctaatccattgtgctctgcacgcgtgggttcgaatcccaccttcgtcg

SEQ ID NO: 202 - DNA, 82 bp, Homo sapiens
  source 1..82: mol_type = genomic DNA
gacgaggtggccgagtggttaaggcgatggactgctaatccattgtgctttgcacgcgtgggttcgaatcccatcctcgtcg

SEQ ID NO: 203 - DNA, 82 bp, Homo sapiens
  source 1..82: mol_type = genomic DNA
gacgaggtggccgagtggttaaggcgatggactgctaatccattgtgctctgcacgcgtgggttcgaatcccatcctcgtcg

SEQ ID NO: 204 - DNA, 82 bp, Homo sapiens
  source 1..82: mol_type = genomic DNA
gacgaggtggccgagtggttaaggcgatggactgctaatccattgtgctctgcacacgtgggttcgaatcccatcctcgtcg

SEQ ID NO: 205 - DNA, 84 bp, Homo sapiens
  source 1..84: mol_type = genomic DNA
ggagaggcctggccgagtggttaaggcgatggactgctaatccattgtgctctgcacgcgtgggttcgaatcccatcctcgtcg

SEQ ID NO: 206 - DNA, 82 bp, Homo sapiens
  source 1..82: mol_type = genomic DNA
gcagcgatggccgagtggttaaggcgttggacttgaaatccaatggggtctccccgcgcaggttcgaaccctgctcgctgcg

SEQ ID NO: 207 - DNA, 82 bp, Homo sapiens
  source 1..82: mol_type = genomic DNA
gtagtcgtggccgagtggttaaggcgatggacttgaaatccattggggtttccccgcgcaggttcgaatcctgccgactacg

SEQ ID NO: 208 - DNA, 82 bp, Homo sapiens
  source 1..82: mol_type = genomic DNA
gtagtcgtggccgagtggttaaggcgatggacttgaaatccattggggtctccccgcgcaggttcgaatcctgccgactacg

SEQ ID NO: 209 - DNA, 82 bp, Homo sapiens
  source 1..82: mol_type = genomic DNA
gtagtcgtggccgagtggttaaggcgatggacttgaaatccattggggtttccccgcgcaggttcgaatcctgtcggctacg

SEQ ID NO: 210 - DNA, 74 bp, Homo sapiens
  source 1..74: mol_type = genomic DNA
ggcgccgtggcttagttggttaaagcgcctgtctagtaaacaggagatcctgggttcgaatcccagcggtgcct

SEQ ID NO: 211 - DNA, 74 bp, Homo sapiens
  source 1..74: mol_type = genomic DNA
ggctccgtggcttagctggttaaagcgcctgtctagtaaacaggagatcctgggttcgaatcccagcggggcct

SEQ ID NO: 212 - DNA, 74 bp, Homo sapiens
  source 1..74: mol_type = genomic DNA
ggctccgtagcttagttggttaaagcgcctgtctagtaaacaggagatcctgggttcgactcccagcggggcct

SEQ ID NO: 213 - DNA, 74 bp, Homo sapiens
  source 1..74: mol_type = genomic DNA
ggcttcgtggcttagctggttaaagcgcctgtctagtaaacaggagatcctgggttcgaatcccagcgaggcct

SEQ ID NO: 214 - DNA, 74 bp, Homo sapiens
  source 1..74: mol_type = genomic DNA
ggcgccgtggcttagctggttaaagcgcctgtctagtaaacaggagatcctgggttcgaatcccagcggtgcct

SEQ ID NO: 215 - DNA, 74 bp, Homo sapiens
  source 1..74: mol_type = genomic DNA
ggccctgtggcttagctggtcaaagcgcctgtctagtaaacaggagatcctgggttcgaatcccagcggggcct

SEQ ID NO: 216 - DNA, 74 bp, Homo sapiens
  source 1..74: mol_type = genomic DNA
ggctctatggcttagttggttaaagcgcctgtctcgtaaacaggagatcctgggttcgactcccagtggggcct

SEQ ID NO: 217 - DNA, 72 bp, Homo sapiens
  source 1..72: mol_type = genomic DNA
ggcgcggtggccaagtggtaaggcgtcggtctcgtaaaccgaagatcacgggttcgaaccccgtccgtgcct

SEQ ID NO: 218 - DNA, 74 bp, Homo sapiens
  source 1..74: mol_type = genomic DNA
ggctctgtggcttagttggctaaagcgcctgtctcgtaaacaggagatcctgggttcgaatcccagcggggcct

SEQ ID NO: 219 - DNA, 72 bp, Homo sapiens
  source 1..72: mol_type = genomic DNA
ggcgcggtggccaagtggtaaggcgtcggtctcgtaaaccgaagatcgcgggttcgaaccccgtccgtgcct

SEQ ID NO: 220 - DNA, 74 bp, Homo sapiens
  source 1..74: mol_type = genomic DNA
ggccctgtagctcagcggttggagcgctggtctcgtaaacctaggggtcgtgagttcaaatctcaccagggcct

SEQ ID NO: 221 - DNA, 74 bp, Homo sapiens
  source 1..74: mol_type = genomic DNA
ggctctatggcttagttggttaaagcgcctgtcttgtaaacaggagatcctgggttcgaatcccagtagagcct

SEQ ID NO: 222 - DNA, 73 bp, Homo sapiens
  source 1..73: mol_type = genomic DNA
ggctccatagctcagtggttagagcactggtcttgtaaaccaggggtcgcgagttcgatcctcgctggggcct

SEQ ID NO: 223 - DNA, 73 bp, Homo sapiens
  source 1..73: mol_type = genomic DNA
ggctccatagctcaggggttagagcgctggtcttgtaaaccaggggtcgcgagttcaattctcgctggggcct

SEQ ID NO: 224 - DNA, 73 bp, Homo sapiens
  source 1..73: mol_type = genomic DNA
ggctccatagctcaggggttagagcactggtcttgtaaaccaggggtcgcgagttcaaatctcgctggggcct

SEQ ID NO: 225 - DNA, 73 bp, Homo sapiens
  source 1..73: mol_type = genomic DNA
ggccctatagctcaggggttagagcactggtcttgtaaaccaggggtcgcgagttcaaatctcgctggggcct

SEQ ID NO: 226 - DNA, 72 bp, Homo sapiens
  source 1..72: mol_type = genomic DNA
ggctccatagctcaggggttagagcactggtcttgtaaaccagggtcgcgagttcaaatctcgctggggcct

SEQ ID NO: 227 - DNA, 72 bp, Homo sapiens
  source 1..72: mol_type = genomic DNA
ggcctcgtggcgcaacggtagcgcgtctgactccagatcagaaggttgcgtgttcaaatcacgtcggggtca

SEQ ID NO: 228 - DNA, 72 bp, Homo sapiens
  source 1..72: mol_type = genomic DNA
gacctcgtggcgcaatggtagcgcgtctgactccagatcagaaggttgcgtgttcaagtcacgtcggggtca

SEQ ID NO: 229 - DNA, 72 bp, Homo sapiens
  source 1..72: mol_type = genomic DNA
gacctcgtggcgcaacggtagcgcgtctgactccagatcagaaggttgcgtgttcaaatcacgtcggggtca

SEQ ID NO: 230 - DNA, 72 bp, Homo sapiens
  source 1..72: mol_type = genomic DNA
gacctcgtggcgcaacggtagcgcgtctgactccagatcagaaggctgcgtgttcgaatcacgtcggggtca

SEQ ID NO: 231 - DNA, 72 bp, Homo sapiens
  source 1..72: mol_type = genomic DNA
gacctcgtggcgcaacggcagcgcgtctgactccagatcagaaggttgcgtgttcaaatcacgtcggggtca

SEQ ID NO: 232 - DNA, 93 bp, Homo sapiens
  source 1..93: mol_type = genomic DNA
ccttcaatagttcagctggtagagcagaggactatagctacttcctcagtaggagacgtccttaggttgctggttcgattccagcttgaagga

SEQ ID NO: 233 - DNA, 91 bp, Homo sapiens
  source 1..91: mol_type = genomic DNA
ccttcgatagctcagttggtagagcggaggactgtagttggctgtgtccttagacatccttaggtcgctggttcgaatccggctcgaagga

SEQ ID NO: 234 - DNA, 89 bp, Homo sapiens
  source 1..89: mol_type = genomic DNA
ccttcgatagctcagttggtagagcggaggactgtagtggatagggcgtggcaatccttaggtcgctggttcgattccggctcgaagga

SEQ ID NO: 235 - DNA, 89 bp, Homo sapiens
  source 1..89: mol_type = genomic DNA
ccttcgatagctcagttggtagagcggaggactgtaggctcattaagcaaggtatccttaggtcgctggttcgaatccggctcggagga

SEQ ID NO: 236 - DNA, 94 bp, Homo sapiens
  source 1..94: mol_type = genomic DNA
ccttcgatagctcagctggtagagcggaggactgtagattgtatagacatttgcggacatccttaggtcgctggttcgattccagctcgaagga

SEQ ID NO: 237 - DNA, 93 bp, Homo sapiens
  source 1..93: mol_type = genomic DNA
ccttcgatagctcagctggtagagcggaggactgtagctacttcctcagcaggagacatccttaggtcgctggttcgattccggctcgaagga

SEQ ID NO: 238 - DNA, 89 bp, Homo sapiens
  source 1..89: mol_type = genomic DNA
ccttcgatagctcagctggtagagcggaggactgtaggcgcgcgcccgtggccatccttaggtcgctggttcgattccggctcgaagga

SEQ ID NO: 239 - DNA, 94 bp, Homo sapiens
  source 1..94: mol_type = genomic DNA
ccttcgatagctcagctggtagagcggaggactgtagcctgtagaaacatttgtggacatccttaggtcgctggttcgattccggctcgaagga

SEQ ID NO: 240 - DNA, 94 bp, Homo sapiens
  source 1..94: mol_type = genomic DNA
ccttcgatagctcagctggtagagcggaggactgtagattgtacagacatttgcggacatccttaggtcgctggttcgattccggctcgaagga

SEQ ID NO: 241 - DNA, 89 bp, Homo sapiens
  source 1..89: mol_type = genomic DNA
ccttcgatagctcagctggtagagcggaggactgtagtacttaatgtgtggtcatccttaggtcgctggttcgattccggctcgaagga

SEQ ID NO: 242 - DNA, 89 bp, Homo sapiens
  source 1..89: mol_type = genomic DNA
ccttcgatagctcagctggtagagcggaggactgtaggggtttgaatgtggtcatccttaggtcgctggttcgaatccggctcggagga

SEQ ID NO: 243 - DNA, 94 bp, Homo sapiens
  source 1..94: mol_type = genomic DNA
ccttcgatagctcagctggtagagcggaggactgtagactgcggaaacgtttgtggacatccttaggtcgctggttcaattccggctcgaagga

SEQ ID NO: 244 - DNA, 90 bp, Homo sapiens
  source 1..90: mol_type = genomic DNA
ctttcgatagctcagttggtagagcggaggactgtaggttcattaaactaaggcatccttaggtcgctggttcgaatccggctcgaagga

SEQ ID NO: 245 - DNA, 88 bp, Homo sapiens
  source 1..88: mol_type = genomic DNA
tcttcaatagctcagctggtagagcggaggactgtaggtgcacgcccgtggccattcttaggtgctggtttgattccgacttggagag

SEQ ID NO: 246 - DNA, 73 bp, Homo sapiens
  source 1..73: mol_type = genomic DNA
gtttccgtagtgtagtggttatcacgttcgcctaacacgcgaaaggtccccggttcgaaaccgggcggaaaca

SEQ ID NO: 247 - DNA, 73 bp, Homo sapiens
  source 1..73: mol_type = genomic DNA
gtttccgtagtgtagtggtcatcacgttcgcctaacacgcgaaaggtccccggttcgaaaccgggcggaaaca

SEQ ID NO: 248 - DNA, 73 bp, Homo sapiens
  source 1..73: mol_type = genomic DNA
gtttccgtagtgtagtggttatcacgttcgcctaacacgcgaaaggtccctggatcaaaaccaggcggaaaca

SEQ ID NO: 249 - DNA, 73 bp, Homo sapiens
  source 1..73: mol_type = genomic DNA
gtttccgtagtgtagtggttatcacgttcgcctaacacgcgaaaggtccgcggttcgaaaccgggcggaaaca

SEQ ID NO: 250 - DNA, 73 bp, Homo sapiens
  source 1..73: mol_type = genomic DNA
gtttccgtagtgtagtggttatcacgtttgcctaacacgcgaaaggtccccggttcgaaaccgggcagaaaca

SEQ ID NO: 251 - DNA, 72 bp, Homo sapiens
  source 1..72: mol_type = genomic DNA
gggggtgtagctcagtggtagagcgtatgcttaacattcatgaggctctgggttcgatccccagcacttcca

SEQ ID NO: 252 - DNA, 73 bp, Homo sapiens
  source 1..73: mol_type = genomic DNA
gtttccgtagtgtagtggttatcacgttcgcctcacacgcgaaaggtccccggttcgaaaccgggcggaaaca

SEQ ID NO: 253 - DNA, 73 bp, Homo sapiens
  source 1..73: mol_type = genomic DNA
gcttctgtagtgtagtggttatcacgttcgcctcacacgcgaaaggtccccggttcgaaaccgggcagaagca

SEQ ID NO: 254 - DNA, 73 bp, Homo sapiens
  source 1..73: mol_type = genomic DNA
gtttccgtagtgtagcggttatcacattcgcctcacacgcgaaaggtccccggttcgatcccgggcggaaaca

SEQ ID NO: 255 - DNA, 73 bp, Homo sapiens
  source 1..73: mol_type = genomic DNA
gtttccgtagtgtagtggttatcacgttcgcctcacacgcgaaaggtccccggttcgaaactgggcggaaaca

SEQ ID NO: 256 - DNA, 74 bp, Homo sapiens
  source 1..74: mol_type = genomic DNA
gtttccgtagtgtagtggttatcacgttcgcctcacacgcgtaaaggtccccggttcgaaaccgggcggaaaca

SEQ ID NO: 257 - DNA, 73 bp, Homo sapiens
  source 1..73: mol_type = genomic DNA
gtttccgtagtggagtggttatcacgttcgcctcacacgcgaaaggtccccggtttgaaaccaggcggaaaca

SEQ ID NO: 258 - DNA, 73 bp, Homo sapiens
  source 1..73: mol_type = genomic DNA
ggttccatagtgtagtggttatcacgtctgctttacacgcagaaggtcctgggttcgagccccagtggaacca

SEQ ID NO: 259 - DNA, 73 bp, Homo sapiens
  source 1..73: mol_type = genomic DNA
ggttccatagtgtagcggttatcacgtctgctttacacgcagaaggtcctgggttcgagccccagtggaacca

SEQ ID NO: 260 - DNA, 73 bp, Homo sapiens
  source 1..73: mol_type = genomic DNA
ggttccatagtgtagtggttatcacatctgctttacacgcagaaggtcctgggttcaagccccagtggaacca

SEQ ID NO: 261 - DNA, 73 bp, Homo sapiens
  source 1..73: mol_type = genomic DNA
gtttccgtggtgtagtggttatcacattcgccttacacgcgaaaggtcctcgggtcgaaaccgagcggaaaca

SEQ ID NO: 262 - DNA, 72 bp, Homo sapiens
  source 1..72: mol_type = genomic DNA
agcagagtggcgcagcggaagcgtgctgggcccataacccagaggtcgatggatcgaaaccatcctctgcta

SEQ ID NO: 263 - DNA, 72 bp, Homo sapiens
  source 1..72: mol_type = genomic DNA
agcagagtggcgcagcggaagcgtgctgggcccataacccagaggtcgatggatctaaaccatcctctgcta

SEQ ID NO: 264 - DNA, 73 bp, Homo sapiens
  source 1..73: mol_type = genomic DNA
tccctggtggtctagtggctaggattcggcgctttcaccgccgcggcccgggttcgattcccggtcagggaat

SEQ ID NO: 265 - DNA, 72 bp, Homo sapiens
  source 1..72: mol_type = genomic DNA
gcgttggtggtttagtggtagaattctcgcctcccatgcgggagacccgggttcaattcccggccactgcac

SEQ ID NO: 266 - DNA, 72 bp, Homo sapiens
  source 1..72: mol_type = genomic DNA
ggccttggtggtgcagtggtagaattctcgcctcccacgtgggagacccgggttcaattcccggccaatgca

SEQ ID NO: 267 - DNA, 73 bp, Homo sapiens
  source 1..73: mol_type = genomic DNA
gtccctggtggtctagtggctaggattcggcgctttcaccgccgcggcccgggttcgattcccggccagggaa

SEQ ID NO: 268 - DNA, 75 bp, Homo sapiens
  source 1..75: mol_type = genomic DNA
tgtctctgtggcgcaatcggttagcgcgttcggctgttaaccgaaagattggtggttcgagcccacccagggacg

SEQ ID NO: 269 - DNA, 86 bp, Homo sapiens
  source 1..86: mol_type = genomic DNA
tggctccgtggcgcaatggatagcgcattggacttctagaggctgaaggcattcaaaggttccgggttcgagtcccggcggagtcg

SEQ ID NO: 270 - DNA, 74 bp, Homo sapiens
  source 1..74: mol_type = genomic DNA
gcccggctagctcagtcggtagagcatgagactcttaatctcagggtcgtgggttcgagccccacgttgggcgc

SEQ ID NO: 271 - DNA, 73 bp, Homo sapiens
  source 1..73: mol_type = genomic DNA
gccgtgatcgtatagtggttagtactctgcgttgtggccgcagcaacctcggttcgaatccgagtcacggcag

SEQ ID NO: 272 - DNA, 73 bp, Homo sapiens
  source 1..73: mol_type = genomic DNA
gcgttggtggtatagtggtgagcatagctgccttccaagcagttgacccgggttcgattcccggccaacgcag

SEQ ID NO: 273 - DNA, 73 bp, Homo sapiens
  source 1..73: mol_type = genomic DNA
tccctggtggtctagtggttaggattcggcgctctcaccgccgcggcccgggttcgattcccggtcagggaaa

SEQ ID NO: 274 - DNA, 73 bp, Homo sapiens
  source 1..73: mol_type = genomic DNA
aggttccatggtgtaatggtgagcactctggactctgaatccagcgatccgagttcgagtctcggtggaacct

SEQ ID NO: 275 - DNA, 75 bp, Homo sapiens
  source 1..75: mol_type = genomic DNA
tgtctctgtggcgtagtcggttagcgcgttcggctgttaaccgaaaagttggtggttcgagcccacccaggaacg

SEQ ID NO: 276 - DNA, 75 bp, Homo sapiens
  source 1..75: mol_type = genomic DNA
tgtctctgtggcgcaatcggttagcgcgttcggctgttaaccgaaaggttggtggttcgagcccacccagggacg

SEQ ID NO: 277 - DNA, 75 bp, Homo sapiens
  source 1..75: mol_type = genomic DNA
gtctctgtggcgcaatcggttagcgcattcggctgttaaccgaaaggttggtggttcgagcccacccagggacgc

SEQ ID NO: 278 - DNA, 75 bp, Homo sapiens
  source 1..75: mol_type = genomic DNA
gtctctgtggcgcaatgggttagcgcgttcggctgttaaccgaaaggttggtggttcgagcccatccagggacgc

SEQ ID NO: 279 - DNA, 72 bp, Homo sapiens
  source 1..72: mol_type = genomic DNA
gcactggtggttcagtggtagaattctcgcctcacacgcgggacacccgggttcaattcccggtcaaggcaa

SEQ ID NO: 280 - DNA, 74 bp, Homo sapiens
  source 1..74: mol_type = genomic DNA
gtttccgtagtgtagtggttatcacgttcgcctcacacgcgaaaggtccccggttcgaaactgggcggaaacag

SEQ ID NO: 281 - DNA, 72 bp, Homo sapiens
  source 1..72: mol_type = genomic DNA
gcactggtggttcagtggtagaattctcgcctcccacgcgggagacccgggtttaattcccggtcaagataa

SEQ ID NO: 282 - DNA, 75 bp, Homo sapiens
  source 1..75: mol_type = genomic DNA
gtttccgtagtgtagtggttatcacgttcgcctcacacgcgtaaaggtccccggttcgaaaccgggcggaaacat

SEQ ID NO: 283 - DNA, 73 bp, Homo sapiens
  source 1..73: mol_type = genomic DNA
tagcagagtggcgcagcggaagcgtgctgggcccataacccagaggtcgatggatcgaaaccatcctctgcta

SEQ ID NO: 284 - DNA, 74 bp, Homo sapiens
  source 1..74: mol_type = genomic DNA
gtttccgtagtgtagtggttatcacgttcgcctcacacgcgaaaggtccccggttcgaaaccgggcggaaacaa

SEQ ID NO: 285 - DNA, 73 bp, Homo sapiens
  source 1..73: mol_type = genomic DNA
tcctcgttagtatagtggtgagtatccccgcctgtcacgcgggagaccggggttcgattccccgacggggagg

SEQ ID NO: 286 - DNA, 72 bp, Homo sapiens
  source 1..72: mol_type = genomic DNA
tgcatgggtggttcagtggtagaattctcgcctgccacgcgggaggcccgggttcgattcccggcccatgca

SEQ ID NO: 287 - DNA, 73 bp, Homo sapiens
  source 1..73: mol_type = genomic DNA
tccctggtggtctagtggttaggattcggcgctctcaccgccgcggcccgggttcgattcccggtcagggaag

SEQ ID NO: 288 - DNA, 73 bp, Homo sapiens
  source 1..73: mol_type = genomic DNA
atccttgttactatagtggtgagtatctctgcctgtcatgcgtgagagagggggtcgattccccgacggggag

SEQ ID NO: 289 - DNA, 72 bp, Homo sapiens
  source 1..72: mol_type = genomic DNA
gcattggtggttcagtggtagaattctcgcctgccacgcgggaggcccgggttcgattcccggccaatgcac

SEQ ID NO: 290 - DNA, 84 bp, Homo sapiens
  source 1..84: mol_type = genomic DNA
gtcaggatggccgagcggtctaaggcgctgcgttcaggtcgcagtctcccctggaggcgtgggttcgaatcccactcctgacaa

SEQ ID NO: 291 - DNA, 73 bp, Homo sapiens
  source 1..73: mol_type = genomic DNA
cgcgttggtggtatagtggtgagcatagctgccttccaagcagttgacccgggttcgattcccggccaacgca

SEQ ID NO: 292 - DNA, 75 bp, Homo sapiens
  source 1..75: mol_type = genomic DNA
cgtctctgtggcgcaatcggttagcgcgttcggctgttaaccgaaaggttggtggttcgatcccacccagggacg

SEQ ID NO: 293 - DNA, 73 bp, Homo sapiens
  source 1..73: mol_type = genomic DNA
cgcgttggtggtgtagtggtgagcacagctgcctttcaagcagttaacgcgggttcgattcccgggtaacgaa

SEQ ID NO: 294 - DNA, 73 bp, Homo sapiens
  source 1..73: mol_type = genomic DNA
cggctcgttggtctaggggtatgattctcgcttcgggtgcgagaggtcccgggttcaaatcccggacgagccc

SEQ ID NO: 295 - DNA, 73 bp, Homo sapiens
  source 1..73: mol_type = genomic DNA
ggctcgttggtctaggggtatgattctcgcttagggtgcgagaggtcccgggttcaaatcccggacgagccct

SEQ ID NO: 296 - DNA, 74 bp, Homo sapiens
  source 1..74: mol_type = genomic DNA
cgcccggatagctcagtcggtagagcatcagacttttaatctgagggtccagggttcaagtccctgttcgggcg

SEQ ID NO: 297 - DNA, 74 bp, Homo sapiens
  source 1..74: mol_type = genomic DNA
gcccggatagctcagtcggtagagcatcagacttttaatctgagggtccagggttcaagtccctgttcgggcgt

SEQ ID NO: 298 - DNA, 107 bp, Homo sapiens
  source 1..107: mol_type = genomic DNA
tgtcaggatggccgagtggtctaaggcgccagactcaaggtaagcaccttgcctgcgggctttctggtctccggatggaggcgtgggttcgaatcccacttctgaca

SEQ ID NO: 299 - DNA, 73 bp, Homo sapiens
  source 1..73: mol_type = genomic DNA
ttccctggtggtctagtggttaggattcggcgctctcaccgccgcggcccgggttcgattcccggtcaggaaa

SEQ ID NO: 300 - DNA, 90 bp, Homo sapiens
  source 1..90: mol_type = genomic DNA
gccttcgatagctcagttggtagagcggaggactgtagtggatagggcgtggcaatccttaggtcgctggttcgattccggctcgaagga

SEQ ID NO: 301 - DNA, 74 bp, Homo sapiens
  source 1..74: mol_type = genomic DNA
cgggggattagctcaaatggtagagcgctcgcttagcatgcgagaggtagcgggatcgatgcccgcatcctcca

SEQ ID NO: 302 - DNA, 94 bp, Homo sapiens
  source 1..94: mol_type = genomic DNA
agctccagtggcgcaatcggttagcgcgcggtacttatacagcagtacatgcagagcaatgccgaggttgtgagttcgagcctcacctggagca

SEQ ID NO: 303 - DNA, 72 bp, Homo sapiens
  source 1..72: mol_type = genomic DNA
gcgccgctggtgtagtggtatcatgcaagattcccattcttgcgacccgggttcgattcccgggcggcgcat

SEQ ID NO: 304 - DNA, 73 bp, Homo sapiens
  source 1..73: mol_type = genomic DNA
tcccatatggtctagcggttaggattcctggttttcacccaggtggcccgggttcgactcccggtatgggaac

SEQ ID NO: 305 - DNA, 73 bp, Homo sapiens
  source 1..73: mol_type = genomic DNA
gggggatgtagctcagtggtagagcgcgcgcttcgcatgtgtgaggtcccgggttcaatccccggcatctcca

SEQ ID NO: 306 - DNA, 72 bp, Homo sapiens
  source 1..72: mol_type = genomic DNA
gcattggtggttcagtggtagaattctcgcctgccacgcgggaggcccgggttcgattcccggccaatgcaa

SEQ ID NO: 307 - DNA, 74 bp, Homo sapiens
  source 1..74: mol_type = genomic DNA
gggccagtggcgcaatggataacgcgtctgactacggatcagaagattctaggttcgactcctggctggctcgc

SEQ ID NO: 308 - DNA, 74 bp, Homo sapiens
  source 1..74: mol_type = genomic DNA
ggtttccgtagtgtagtggttatcacgttcgcctaacacgcgaaaggtccccggttcgaaaccgggcggaaaca

SEQ ID NO: 309 - DNA, 74 bp, Homo sapiens
  source 1..74: mol_type = genomic DNA
agtttccgtagtgtagtggttatcacgttcgcctaacacgcgaaaggtccccggttcgaaaccgggcggaaaca

SEQ ID NO: 310 - DNA, 83 bp, Homo sapiens
  source 1..83: mol_type = genomic DNA
aggtagcgtggccgagcggtctaaggcgctggattaaggctccagtctcttcgggggcgtgggttcgaatcccaccgctgcca

SEQ ID NO: 311 - DNA, 74 bp, Homo sapiens
  source 1..74: mol_type = genomic DNA
gtttccgtagtgtagtggtcatcacgttcgcctaacacgcgaaaggtccccggttcgaaaccgggcggaaacat

SEQ ID NO: 312 - DNA, 73 bp, Homo sapiens
  source 1..73: mol_type = genomic DNA
ggctcgttggtctaggggtatgattctcgctttgggtgcgagaggtcccgggttcaaatcccggacgagccca

SEQ ID NO: 313 - DNA, 73 bp, Homo sapiens
  source 1..73: mol_type = genomic DNA
ggctccatagctcaggggttagagcactggtcttgtaaaccagggtcgcgagttcaaatctcgctggggcctg

SEQ ID NO: 314 - DNA, 73 bp, Homo sapiens
  source 1..73: mol_type = genomic DNA
tggggatgtagctcagtggtagagcgcatgctttgcatgtatgaggccccgggttcgatccccggcatctcca

SEQ ID NO: 315 - DNA, 74 bp, Homo sapiens
  source 1..74: mol_type = genomic DNA
cgcccggctagctcagtcggtagagcatgagactcttaatctcagggtcgtgggttcgagccccacgttgggcg

SEQ ID NO: 316 - DNA, 74 bp, Homo sapiens
  source 1..74: mol_type = genomic DNA
gtttccgtagtgtagtggttatcacgttcgcctaacacgcgaaaggtccccggttcgaaaccgggcggaaacaa

SEQ ID NO: 317 - DNA, 74 bp, Homo sapiens
  source 1..74: mol_type = genomic DNA
gcccggctagctcagtcggtagagcatgagactcttaatctcagggtcgtgggttcgagccccacgttgggcgt

SEQ ID NO: 318 - DNA, 74 bp, Homo sapiens
  source 1..74: mol_type = genomic DNA
gtttccgtagtgtagtggttatcacgttcgcctcacacgcgaaaggtccccggttcgaaaccgggcggaaacac

SEQ ID NO: 319 - DNA, 73 bp, Homo sapiens
  source 1..73: mol_type = genomic DNA
cagcagagtggcgcagcggaagcgtgctgggcccataacccagaggtcgatggatcgaaaccatcctctgcta

SEQ ID NO: 320 - DNA, 85 bp, Homo sapiens
  source 1..85: mol_type = genomic DNA
ggagaggcctggccgagtggttaaggcgatggactgctaatccattgtgctctgcacgcgtgggttcgaatcccatcctcgtcgc

SEQ ID NO: 321 - DNA, 73 bp, Homo sapiens
  source 1..73: mol_type = genomic DNA
ggccccatggtgtaatggttagcactctggactttgaatccagcgatccgagttcaaatctcggtgggacctg

SEQ ID NO: 322 - DNA, 73 bp, Homo sapiens
  source 1..73: mol_type = genomic DNA
ggccccatggtgtaatggttagcactctggactttgaatccagcgatccgagttcaaatctcggtgggaccta

SEQ ID NO: 323 - DNA, 83 bp, Homo sapiens
  source 1..83: mol_type = genomic DNA
gtagtcgtggccgagtggttaaggcgatggacttgaaatccattggggtctccccgcgcaggttcgaatcctgccgactacgg

SEQ ID NO: 324 - DNA, 73 bp, Homo sapiens
  source 1..73: mol_type = genomic DNA
agcagagtggcgcagcggaagcgtgctgggcccataacccagaggtcgatggatcgaaaccatcctctgctat

SEQ ID NO: 325 - DNA, 74 bp, Homo sapiens
  source 1..74: mol_type = genomic DNA
ggaccacgtggcctaatggataaggcgtctgacttcggatcagaagattgagggttcgaatccctccgtggtta

SEQ ID NO: 326 - DNA, 83 bp, Homo sapiens
  source 1..83: mol_type = genomic DNA
tgtagtcgtggccgagtggttaaggcgatggactagaaatccattggggtctccccgcgcaggttcgaatcctgccgactacg

SEQ ID NO: 327 - DNA, 73 bp, Homo sapiens
  source 1..73: mol_type = genomic DNA
agcagagtggcgcagcggaagcgtgctgggcccataacccagaggtcgatggatcgaaaccatcctctgctag

SEQ ID NO: 328 - DNA, 84 bp, Homo sapiens
  source 1..84: mol_type = genomic DNA
cgtcaggatggccgagcggtctaaggcgctgcgttcaggtcgcagtctcccctggaggcgtgggttcgaatcccactcctgaca

SEQ ID NO: 329 - DNA, 75 bp, Homo sapiens
  source 1..75: mol_type = genomic DNA
ggctccgtggcttagctggttaaagcgcctgtctagtaaacaggagatcctgggttcgaatcccagcggggcctg

SEQ ID NO: 330 - DNA, 74 bp, Homo sapiens
  source 1..74: mol_type = genomic DNA
agggccagtggcgcaatggataacgcgtctgactacggatcagaagattccaggttcgactcctggctggctcg

SEQ ID NO: 331 - DNA, 74 bp, Homo sapiens
  source 1..74: mol_type = genomic DNA
ggtttccgtagtgtagtggttatcacgttcgcctcacacgcgaaaggtccccggttcgaaaccgggcggaaaca

SEQ ID NO: 332 - DNA, 73 bp, Homo sapiens
  source 1..73: mol_type = genomic DNA
aggggatgtagctcagtggtagagcgcatgcttcgcatgtatgaggtcccgggttcgatccccggcatctcca

SEQ ID NO: 333 - DNA, 75 bp, Homo sapiens
  source 1..75: mol_type = genomic DNA
tggccggttagctcagttggttagagcgtggtgctaataacgccaaggtcgcgggttcgatccccgtacgggcca

SEQ ID NO: 334 - DNA, 73 bp, Homo sapiens
  source 1..73: mol_type = genomic DNA
cggctcgttggtctaggggtatgattctcgcttagggtgcgagaggtcccgggttcaaatcccggacgagccc

SEQ ID NO: 335 - DNA, 74 bp, Homo sapiens
  source 1..74: mol_type = genomic DNA
agcccggctagctcagtcggtagagcatgagactcttaatctcagggtcgtgggttcgagccccacgttgggcg

SEQ ID NO: 336 - DNA, 92 bp, Homo sapiens
  source 1..92: mol_type = genomic DNA
tccttcgatagctcagttggtagagcggaggactgtagttggctgtgtccttagacatccttaggtcgctggttcgaatccggctcgaagga

SEQ ID NO: 337 - DNA, 74 bp, Homo sapiens
  source 1..74: mol_type = genomic DNA
ggggaattagctcaaatggtagagcgctcgcttagcatgcgagaggtagcgggatcgatgcccgcattctccag

SEQ ID NO: 338 - DNA, 74 bp, Homo sapiens
  source 1..74: mol_type = genomic DNA
cgccctcttagcgcagcgggcagcgcgtcagtctcataatctgaaggtcctgagttcgagcctcagagagggca

SEQ ID NO: 339 - DNA, 95 bp, Homo sapiens
  source 1..95: mol_type = genomic DNA
tgctccagtggcgcaatcggttagcgcgcggtacttatatggcagtatgtgtgcgagtgatgccgaggttgtgagttcgagcctcacctggagca

SEQ ID NO: 340 - DNA, 73 bp, Homo sapiens
  source 1..73: mol_type = genomic DNA
tgccgtgatcgtatagtggttagtactctgcgttgtggccgcagcaacctcggttcgaatccgagtcacggca

SEQ ID NO: 341 - DNA, 75 bp, Homo sapiens
  source 1..75: mol_type = genomic DNA
ggccggttagctcagttggttagagcgtggtgctaataacgccaaggtcgcgggttcgatccccgtacgggccac

SEQ ID NO: 342 - DNA, 74 bp, Homo sapiens
  source 1..74: mol_type = genomic DNA
agtttccgtagtgtagtggttatcacgtttgcctaacacgcgaaaggtccccggttcgaaaccgggcagaaaca

SEQ ID NO: 343 - DNA, 74 bp, Homo sapiens
  source 1..74: mol_type = genomic DNA
gcttctgtagtgtagtggttatcacgttcgcctcacacgcgaaaggtccccggttcgaaaccgggcagaagcaa

SEQ ID NO: 344 - DNA, 73 bp, Homo sapiens
  source 1..73: mol_type = genomic DNA
ttcctcgttagtatagtggtgagtatccccgcctgtcacgcgggagaccggggttcgattccccgacggggag

SEQ ID NO: 345 - DNA, 83 bp, Homo sapiens
  source 1..83: mol_type = genomic DNA
gtagtcgtggccgagtggttaaggcgatggacttgaaatccattggggtttccccgcgcaggttcgaatcctgtcggctacgg

SEQ ID NO: 346 - DNA, 73 bp, Homo sapiens
  source 1..73: mol_type = genomic DNA
aggttccatggtgtaatggttagcactctggactctgaatccagcgatccgagttcaaatctcggtggaacct

SEQ ID NO: 347 - DNA, 73 bp, Homo sapiens
  source 1..73: mol_type = genomic DNA
tcctcgttagtatagtggtgagtgtccccgtctgtcacgcgggagaccggggttcgattccccgacggggaga

SEQ ID NO: 348 - DNA, 74 bp, Homo sapiens
  source 1..74: mol_type = genomic DNA
gtttccgtagtgtagtggttatcacgttcgcctaacacgcgaaaggtccctggatcaaaaccaggcggaaacaa

SEQ ID NO: 349 - DNA, 75 bp, Homo sapiens
  source 1..75: mol_type = genomic DNA
cggccggttagctcagttggttagagcgtggtgctaataacgccaaggtcgcgggttcgatccccgtactggcca

SEQ ID NO: 350 - DNA, 73 bp, Homo sapiens
  source 1..73: mol_type = genomic DNA
ggccccatggtgtaatggtcagcactctggactctgaatccagcgatccgagttcaaatctcggtgggaccca

SEQ ID NO: 351 - DNA, 73 bp, Homo sapiens
  source 1..73: mol_type = genomic DNA
ggccccatggtgtaatggttagcactctggactttgaatccagcgatccgagttcaaatctcggtgggacctt

SEQ ID NO: 352 - DNA, 73 bp, Homo sapiens
  source 1..73: mol_type = genomic DNA
tgggggtgtagctcagtggtagagcgcgtgcttagcatgtacgaggtcccgggttcaatccccggcacctcca

SEQ ID NO: 353 - DNA, 73 bp, Homo sapiens
  source 1..73: mol_type = genomic DNA
ggggatgtagctcagtggtagagcgcatgcttagcatgcatgaggtcccgggttcgatccccagcatctccag

SEQ ID NO: 354 - DNA, 73 bp, Homo sapiens
  source 1..73: mol_type = genomic DNA
agggggtgtagctcagtggtagagcgcgtgcttcgcatgtacgaggccccgggttcgacccccggctcctcca

SEQ ID NO: 355 - DNA, 73 bp, Homo sapiens
  source 1..73: mol_type = genomic DNA
gggggtgtagctcagtggtagagcgcgtgcttagcatgcacgaggccccgggttcaatccccggcacctccat

SEQ ID NO: 356 - DNA, 73 bp, Homo sapiens
  source 1..73: mol_type = genomic DNA
gggggtgtagctcagtggtagagcgcgtgcttagcatgcacgaggccccgggttcaatccccggcacctccag

SEQ ID NO: 357 - DNA, 107 bp, Homo sapiens
  source 1..107: mol_type = genomic DNA
gtcaggatggccgagtggtctaaggcgccagactcaagctaagcttcctccgcggtggggattctggtctccaatggaggcgtgggttcgaatcccacttctgacac

SEQ ID NO: 358 - DNA, 106 bp, Homo sapiens
  source 1..106: mol_type = genomic DNA
tgtcaggatggccgagtggtctaaggcgccagactcaagcttggcttcctcgtgttgaggattctggtctccaatggaggcgtgggttcgaatcccacttctgaca

SEQ ID NO: 359 - DNA, 73 bp, Homo sapiens
  source 1..73: mol_type = genomic DNA
ggttccatggtgtaatggttagcactctggactctgaatccagcgatccgagttcaaatctcggtggaacctt

SEQ ID NO: 360 - DNA, 83 bp, Homo sapiens
  source 1..83: mol_type = genomic DNA
ggtagcgtggccgagcggtctaaggcgctggattaaggctccagtctcttcgggggcgtgggttcgaatcccaccgctgccag

SEQ ID NO: 361 - DNA, 74 bp, Homo sapiens
  source 1..74: mol_type = genomic DNA
tgcctccttagcgcagtaggcagcgcgtcagtctcataatctgaaggtcctgagttcgaacctcagagggggca

SEQ ID NO: 362 - DNA, 74 bp, Homo sapiens
  source 1..74: mol_type = genomic DNA
agcccggatagctcagtcggtagagcatcagacttttaatctgagggtccagggttcaagtccctgttcgggcg

SEQ ID NO: 363 - DNA, 74 bp, Homo sapiens
  source 1..74: mol_type = genomic DNA
gcctccttagcgcagtaggcagcgcgtcagtctcataatctgaaggtcctgagttcgaacctcagagggggcag

SEQ ID NO: 364 - DNA, 73 bp, Homo sapiens
  source 1..73: mol_type = genomic DNA
ttccctggtggtctagtggttaggattcggcgctctcaccgccgcggcccgggttcgattcccggtcagggaa

SEQ ID NO: 365 - DNA, 84 bp, Homo sapiens
  source 1..84: mol_type = genomic DNA
caccaggatggccgagtggttaaggcgttggacttaagatccaatggacatatgtccgcgtgggttcgaaccccactcctggta

SEQ ID NO: 366 - DNA, 73 bp, Homo sapiens
  source 1..73: mol_type = genomic DNA
tggctcgttggtctaggggtatgattctcgcttagggtgcgagaggtcccgggttcaaatcccggacgagccc

SEQ ID NO: 367 - DNA, 74 bp, Homo sapiens
  source 1..74: mol_type = genomic DNA
agccccagtggcctaatggataaggcattggcctcctaagccagggattgtgggttcgagtcccatctggggtg

SEQ ID NO: 368 - DNA, 73 bp, Homo sapiens
  source 1..73: mol_type = genomic DNA
ggggatatagctcaggggtagagcatttgactgcagatcaagaggtccccggttcaaatccgggtgccccccc

SEQ ID NO: 369 - DNA, 94 bp, Homo sapiens
  source 1..94: mol_type = genomic DNA
cccttcgatagctcagctggtagagcggaggactgtagctacttcctcagcaggagacatccttaggtcgctggttcgattccggctcgaagga

SEQ ID NO: 370 - DNA, 90 bp, Homo sapiens
  source 1..90: mol_type = genomic DNA
cccttcgatagctcagctggtagagcggaggactgtaggcgcgcgcccgtggccatccttaggtcgctggttcgattccggctcgaagga

SEQ ID NO: 371 - DNA, 74 bp, Homo sapiens
  source 1..74: mol_type = genomic DNA
tgggggattagctcaaatggtagagcgctcgcttagcatgcgagaggtagcgggatcgatgcccgcatcctcca

SEQ ID NO: 372 - DNA, 83 bp, Homo sapiens
  source 1..83: mol_type = genomic DNA
gtagtcgtggccgagtggttaaggcgatggactagaaatccattggggtctccccgcgcaggttcgaatcctgccgactacgg

SEQ ID NO: 373 - DNA, 74 bp, Homo sapiens
  source 1..74: mol_type = genomic DNA
gcctcgttagcgcagtaggtagcgcgtcagtctcataatctgaaggtcgtgagttcgatcctcacacggggcac

SEQ ID NO: 374 - DNA, 92 bp, Homo sapiens
  source 1..92: mol_type = genomic DNA
ggctctgtggcgcaatggatagcgcattggacttctagctgagcctagtgtggtcattcaaaggttgtgggttcgagtcccaccagagtcga

SEQ ID NO: 375 - DNA, 75 bp, Homo sapiens
  source 1..75: mol_type = genomic DNA
gtctctgtggcgcaatcggttagcgcgttcggctgttaaccgaaaggttggtggttcgagcccacccagggacgc

SEQ ID NO: 376 - DNA, 83 bp, Homo sapiens
  source 1..83: mol_type = genomic DNA
ggcagcgatggccgagtggttaaggcgttggacttgaaatccaatggggtctccccgcgcaggttcgaaccctgctcgctgcg

SEQ ID NO: 377 - DNA, 74 bp, Homo sapiens
  source 1..74: mol_type = genomic DNA
ggttccatagtgtagtggttatcacgtctgctttacacgcagaaggtcctgggttcgagccccagtggaaccat

SEQ ID NO: 378 - DNA, 74 bp, Homo sapiens
  source 1..74: mol_type = genomic DNA
ggttccatagtgtagcggttatcacgtctgctttacacgcagaaggtcctgggttcgagccccagtggaaccac

SEQ ID NO: 379 - DNA, 87 bp, Homo sapiens
  source 1..87: mol_type = genomic DNA
tggctctgtggcgcaatggatagcgcattggacttctagatagttagagaaattcaaaggttgtgggttcgagtcccaccagagtcg

SEQ ID NO: 380 - DNA, 84 bp, Homo sapiens
  source 1..84: mol_type = genomic DNA
taccagaatggccgagtggttaaggcgttggacttaagatccaatggattcatatccgcgtgggttcgaaccccacttctggta

SEQ ID NO: 381 - DNA, 74 bp, Homo sapiens
  source 1..74: mol_type = genomic DNA
ggcccggatagctcagtcggtagagcatcagacttttaatctgagggtccggggttcaagtccctgttcgggcg

SEQ ID NO: 382 - DNA, 74 bp, Homo sapiens
  source 1..74: mol_type = genomic DNA
gccgaaatagctcagttgggagagcgttagactgaagatctaaaggtccctggttcgatcccgggtttcggcag

SEQ ID NO: 383 - DNA, 74 bp, Homo sapiens
  source 1..74: mol_type = genomic DNA
gcccggatagctcagtcggtagagcatcagacttttaatctgagggtccagggttcaagtccctgttcgggcgg

SEQ ID NO: 384 - DNA, 74 bp, Homo sapiens
  source 1..74: mol_type = genomic DNA
gccgaaatagctcagttgggagagcgttagactgaagatctaaaggtccctggttcaatcccgggtttcggcag

SEQ ID NO: 385 - DNA, 83 bp, Homo sapiens
  source 1..83: mol_type = genomic DNA
ggacgaggtggccgagtggttaaggcgatggactgctaatccattgtgctttgcacgcgtgggttcgaatcccatcctcgtcg

SEQ ID NO: 386 - DNA, 73 bp, Homo sapiens
  source 1..73: mol_type = genomic DNA
ggctcgttggtctaggggtatgattctcggtttgggtccgagaggtcccgggttcaaatcccggacgagcccc

SEQ ID NO: 387 - DNA, 83 bp, Homo sapiens
  source 1..83: mol_type = genomic DNA
agtcacggtggccgagtggttaaggcgttggactcgaaatccaatggggtttccccgcacaggttcgaatcctgttcgtgacg

SEQ ID NO: 388 - DNA, 73 bp, Homo sapiens
  source 1..73: mol_type = genomic DNA
ctcctcgttagtatagtggttagtatccccgcctgtcacgcgggagaccggggttcaattccccgacggggag

SEQ ID NO: 389 - DNA, 73 bp, Homo sapiens
  source 1..73: mol_type = genomic DNA
ggacctcgtggcgcaacggtagcgcgtctgactccagatcagaaggctgcgtgttcgaatcacgtcggggtca

SEQ ID NO: 390 - DNA, 73 bp, Homo sapiens
  source 1..73: mol_type = genomic DNA
ggggatgtagctcagtggtagagcgcatgctttgcatgtatgaggccccgggttcgatccccggcatctccat

SEQ ID NO: 391 - DNA, 74 bp, Homo sapiens
  source 1..74: mol_type = genomic DNA
gccgaaatagctcagttgggagagcgttagactgaagatctaaaggtccctggttcgatcccgggtttcggcac

SEQ ID NO: 392 - DNA, 73 bp, Homo sapiens
  source 1..73: mol_type = genomic DNA
aggggatgtagctcagtggtagagcgcatgctttgcacgtatgaggccccgggttcaatccccggcatctcca

SEQ ID NO: 393 - DNA, 75 bp, Homo sapiens
  source 1..75: mol_type = genomic DNA
gtctctgtggcgcaatcggttagcgcgttcggctgttaaccgaaaggttggtggttcgagcccacccagggacgg

SEQ ID NO: 394 - DNA, 73 bp, Homo sapiens
  source 1..73: mol_type = genomic DNA
tcccacatggtctagcggttaggattcctggttttcacccaggcggcccgggttcgactcccggtgtgggaac

SEQ ID NO: 395 - DNA, 74 bp, Homo sapiens
  source 1..74: mol_type = genomic DNA
ggctccatagctcaggggttagagcgctggtcttgtaaaccaggggtcgcgagttcaattctcgctggggcctg

SEQ ID NO: 396 - DNA, 83 bp, Homo sapiens
  source 1..83: mol_type = genomic DNA
tggtagtgtggccgagcggtctaaggcgctggatttaggctccagtctcttcgggggcgtgggttcgaatcccaccactgcca

SEQ ID NO: 397 - DNA, 74 bp, Homo sapiens
  source 1..74: mol_type = genomic DNA
ggctccatagctcaggggttagagcactggtcttgtaaaccaggggtcgcgagttcaaatctcgctggggcctc

SEQ ID NO: 398 - DNA, 73 bp, Homo sapiens
  source 1..73: mol_type = genomic DNA
tggctcgttggtctagtggtatgattctcgctttgggtgcgagaggtcccgggttcaaatcccggacgagccc

SEQ ID NO: 399 - DNA, 95 bp, Homo sapiens
  source 1..95: mol_type = genomic DNA
ccttcgatagctcagctggtagagcggaggactgtagattgtacagacatttgcggacatccttaggtcgctggttcgattccggctcgaaggaa

SEQ ID NO: 400 - DNA, 74 bp, Homo sapiens
  source 1..74: mol_type = genomic DNA
aggccctatagctcaggggttagagcactggtcttgtaaaccaggggtcgcgagttcaaatctcgctggggcct

SEQ ID NO: 401 - DNA, 90 bp, Homo sapiens
  source 1..90: mol_type = genomic DNA
tccttcgatagctcagctggtagagcggaggactgtagtacttaatgtgtggtcatccttaggtcgctggttcgattccggctcgaagga

SEQ ID NO: 402 - DNA, 73 bp, Homo sapiens
  source 1..73: mol_type = genomic DNA
tggctcgttggtctaggggtatgattctcgctttgggtgcgagaggtcccgggttcaaatcccggacgagccc

SEQ ID NO: 403 - DNA, 74 bp, Homo sapiens
  source 1..74: mol_type = genomic DNA
gcccggctagctcagtcggtagagcatgggactcttaatcccagggtcgtgggttcgagccccacgttgggcgc

SEQ ID NO: 404 - DNA, 75 bp, Homo sapiens
  source 1..75: mol_type = genomic DNA
cggccggttagctcagttggttagagcgtggtgctaataacgccaaggtcgcgggttcgatccccgtacgggcca

SEQ ID NO: 405 - DNA, 73 bp, Homo sapiens
  source 1..73: mol_type = genomic DNA
tcccacatggtctagcggttaggattcctggttttcacccaggcggcccgggttcgactcccggtgtgggaat

SEQ ID NO: 406 - DNA, 83 bp, Homo sapiens
  source 1..83: mol_type = genomic DNA
gacgaggtggccgagtggttaaggcgatggactgctaatccattgtgctctgcacgcgtgggttcgaatcccatcctcgtcga

SEQ ID NO: 407 - DNA, 73 bp, Homo sapiens
  source 1..73: mol_type = genomic DNA
gccgtgatcgtatagtggttagtactctgcgttgtggccgcagcaacctcggttcgaatccgagtcacggcat

SEQ ID NO: 408 - DNA, 73 bp, Homo sapiens
  source 1..73: mol_type = genomic DNA
cgccgtgatcgtatagtggttagtactctgcgttgtggccgcagcaacctcggttcgaatccgagtcacggca

SEQ ID NO: 409 - DNA, 73 bp, Homo sapiens
  source 1..73: mol_type = genomic DNA
ggttccatggtgtaatggttagcactctggactctgaatccagcgatccgagttcaaatctcggtggaacctg

SEQ ID NO: 410 - DNA, 74 bp, Homo sapiens
  source 1..74: mol_type = genomic DNA
tgcccggctagctcagtcggtagagcatgggactcttaatcccagggtcgtgggttcgagccccacgttgggcg

SEQ ID NO: 411 - DNA, 74 bp, Homo sapiens
  source 1..74: mol_type = genomic DNA
gggccgcgtggcctaatggataaggcgtctgacttcggatcagaagattgcaggttcgagtcctgccgcggtcg

SEQ ID NO: 412 - DNA, 72 bp, Homo sapiens
  source 1..72: mol_type = genomic DNA
gcgccgctggtgtagtggtatcatgcaagattcccattcttgcgacccgggttcgattcccgggcggcgcac

SEQ ID NO: 413 - DNA, 74 bp, Homo sapiens
  source 1..74: mol_type = genomic DNA
gggccgcgtggcctaatggataaggcgtctgattccggatcagaagattgagggttcgagtcccttcgtggtcg

SEQ ID NO: 414 - DNA, 74 bp, Homo sapiens
  source 1..74: mol_type = genomic DNA
cgccccggtggcctaatggataaggcattggcctcctaagccagggattgtgggttcgagtcccacccggggta

SEQ ID NO: 415 - DNA, 74 bp, Homo sapiens
  source 1..74: mol_type = genomic DNA
gcccggctagctcagtcggtagagcatgagacccttaatctcagggtcgtgggttcgagccccacgttgggcgt

SEQ ID NO: 416 - DNA, 73 bp, Homo sapiens
  source 1..73: mol_type = genomic DNA
aggcgcggtggccaagtggtaaggcgtcggtctcgtaaaccgaagatcacgggttcgaaccccgtccgtgcct

SEQ ID NO: 417 - DNA, 83 bp, Homo sapiens
  source 1..83: mol_type = genomic DNA
ggtagcgtggccgagtggtctaaggcgctggatttaggctccagtcatttcgatggcgtgggttcgaatcccaccgctgccac

SEQ ID NO: 418 - DNA, 83 bp, Homo sapiens
  source 1..83: mol_type = genomic DNA
gggtagcgtggccgagcggtctaaggcgctggattaaggctccagtctcttcgggggcgtgggttcgaatcccaccgctgcca

SEQ ID NO: 419 - DNA, 84 bp, Homo sapiens
  source 1..84: mol_type = genomic DNA
agtcaggatggccgagcggtctaaggcgctgcgttcaggtcgcagtctcccctggaggcgtgggttcgaatcccacttctgaca

SEQ ID NO: 420 - DNA, 84 bp, Homo sapiens
  source 1..84: mol_type = genomic DNA
gtcaggatggccgagcggtctaaggcgctgcgttcaggtcgcagtctcccctggaggcgtgggttcgaatcccacttctgacag

SEQ ID NO: 421 - DNA, 74 bp, Homo sapiens
  source 1..74: mol_type = genomic DNA
gcctcgttagcgcagtaggcagcgcgtcagtctcataatctgaaggtcgtgagttcgagcctcacacggggcag

SEQ ID NO: 422 - DNA, 83 bp, Homo sapiens
  source 1..83: mol_type = genomic DNA
ggtagcgtggccgagcggtctaaggcgctggatttaggctccagtctcttcggaggcgtgggttcgaatcccaccgctgccag

SEQ ID NO: 423 - DNA, 89 bp, Homo sapiens
  source 1..89: mol_type = genomic DNA
tggctctgtggcgcaatggatagcgcattggacttctagtgacgaatagagcaattcaaaggttgtgggttcgaatcccaccagagtcg

SEQ ID NO: 424 - DNA, 72 bp, Homo sapiens
  source 1..72: mol_type = genomic DNA
cgcattggtggttcagtggtagaattctcgcctgccacgcgggaggcccgggttcgattcccggccaatgca

SEQ ID NO: 425 - DNA, 83 bp, Homo sapiens
  source 1..83: mol_type = genomic DNA
gctgtgatggccgagtggttaaggcgttggactcgaaatccaatggggtctccccgcgcaggttcgaatcctgctcacagcgt

SEQ ID NO: 426 - DNA, 75 bp, Homo sapiens
  source 1..75: mol_type = genomic DNA
ggcgccgtggcttagctggttaaagcgcctgtctagtaaacaggagatcctgggttcgaatcccagcggtgcctg

SEQ ID NO: 427 - DNA, 73 bp, Homo sapiens
  source 1..73: mol_type = genomic DNA
cgacctcgtggcgcaacggtagcgcgtctgactccagatcagaaggttgcgtgttcaaatcacgtcggggtca

SEQ ID NO: 428 - DNA, 83 bp, Homo sapiens
  source 1..83: mol_type = genomic DNA
agacgaggtggccgagtggttaaggcgatggactgctaatccattgtgctctgcacgcgtgggttcgaatcccatcctcgtcg

SEQ ID NO: 429 - DNA, 75 bp, Homo sapiens
  source 1..75: mol_type = genomic DNA
cggcgccgtggcttagttggttaaagcgcctgtctagtaaacaggagatcctgggttcgaatcccagcggtgcct

SEQ ID NO: 430 - DNA, 73 bp, Homo sapiens
  source 1..73: mol_type = genomic DNA
ggcctcgtggcgcaacggtagcgcgtctgactccagatcagaaggttgcgtgttcaaatcacgtcggggtcaa

SEQ ID NO: 431 - DNA, 73 bp, Homo sapiens
  source 1..73: mol_type = genomic DNA
agcgttggtggtatagtggtaagcatagctgccttccaagcagttgacccgggttcgattcccggccaacgca

SEQ ID NO: 432 - DNA, 73 bp, Homo sapiens
  source 1..73: mol_type = genomic DNA
tcctcgttagtatagtggtgagtatccccgcctgtcacgcgggagaccggggttcgattccccgacggggaga

SEQ ID NO: 433 - DNA, 73 bp, Homo sapiens
  source 1..73: mol_type = genomic DNA
ggctcgttggtctaggggtatgattctcgcttcgggtgcgagaggtcccgggttcaaatcccggacgagccct

SEQ ID NO: 434 - DNA, 75 bp, Homo sapiens
  source 1..75: mol_type = genomic DNA
ggcgccgtggcttagttggttaaagcgcctgtctagtaaacaggagatcctgggttcgaatcccagcggtgcctt

SEQ ID NO: 435 - DNA, 83 bp, Homo sapiens
  source 1..83: mol_type = genomic DNA
gtagtcgtggccgagtggttaaggcgatggactagaaatccattggggtctccccgcgcaggttcgaatcctgccgactacgt

SEQ ID NO: 436 - DNA, 73 bp, Homo sapiens
  source 1..73: mol_type = genomic DNA
tgacctcgtggcgcaatggtagcgcgtctgactccagatcagaaggttgcgtgttcaagtcacgtcggggtca

SEQ ID NO: 437 - DNA, 73 bp, Homo sapiens
  source 1..73: mol_type = genomic DNA
aggcgcggtggccaagtggtaaggcgtcggtctcgtaaaccgaagatcgcgggttcgaaccccgtccgtgcct

SEQ ID NO: 438 - DNA, 73 bp, Homo sapiens
  source 1..73: mol_type = genomic DNA
agggggtatagctcagtggtagagcatttgactgcagatcaagaggtccccggttcaaatccgggtgccccct

SEQ ID NO: 439 - DNA, 73 bp, Homo sapiens
  source 1..73: mol_type = genomic DNA
gggggtatagctcagtggtagagcatttgactgcagatcaagaggtccctggttcaaatccgggtgccccctc

SEQ ID NO: 440 - DNA, 73 bp, Homo sapiens
  source 1..73: mol_type = genomic DNA
gggggtatagctcagtggtagagcatttgactgcagatcaagaggtccccggttcaaatccgggtgccccctc

SEQ ID NO: 441 - DNA, 73 bp, Homo sapiens
  source 1..73: mol_type = genomic DNA
aggtcccatggtgtaatggttagcactctggactttgaatccagcgatccgagttcaaatctcggtgggacct

SEQ ID NO: 442 - DNA, 74 bp, Homo sapiens
  source 1..74: mol_type = genomic DNA
gacccagtggcctaatggataaggcatcagcctccggagctggggattgtgggttcgagtcccatctgggtcgc

SEQ ID NO: 443 - DNA, 74 bp, Homo sapiens
  source 1..74: mol_type = genomic DNA
agccccagtggcctaatggataaggcactggcctcctaagccagggattgtgggttcgagtcccacctggggta

SEQ ID NO: 444 - DNA, 74 bp, Homo sapiens
  source 1..74: mol_type = genomic DNA
gccccagtggcctaatggataaggcactggcctcctaagccagggattgtgggttcgagtcccacctggggtgt

SEQ ID NO: 445 - DNA, 74 bp, Homo sapiens
  source 1..74: mol_type = genomic DNA
agaccgcgtggcctaatggataaggcgtctgacttcggatcagaagattgagggttcgagtcccttcgtggtcg

SEQ ID NO: 446 - DNA, 75 bp, Homo sapiens
  source 1..75: mol_type = genomic DNA
cgtctctgtggcgcaatcggttagcgcgttcggctgttaaccgaaaggttggtggttcgagcccacccagggacg

SEQ ID NO: 447 - DNA, 73 bp, Homo sapiens
  source 1..73: mol_type = genomic DNA
ggcgttggtggtatagtggttagcatagctgccttccaagcagttgacccgggttcgattcccggccaacgca

SEQ ID NO: 448 - DNA, 74 bp, Homo sapiens
  source 1..74: mol_type = genomic DNA
gtttccgtagtgtagcggttatcacattcgcctcacacgcgaaaggtccccggttcgatcccgggcggaaacag

SEQ ID NO: 449 - DNA, 75 bp, Homo sapiens
  source 1..75: mol_type = genomic DNA
tggcgccgtggcttagttggttaaagcgcctgtctagtaaacaggagatcctgggttcgaatcccagcggtgcct

SEQ ID NO: 450 - DNA, 94 bp, Homo sapiens
  source 1..94: mol_type = genomic DNA
gctccagtggcgcaatcggttagcgcgcggtacttatatgacagtgcgagcggagcaatgccgaggttgtgagttcgatcctcacctggagcac

SEQ ID NO: 451 - DNA, 72 bp, Homo sapiens
  source 1..72: mol_type = genomic DNA
gcatgggtggttcagtggtagaattctcgcctgccacgcgggaggcccgggttcgattcccggcccatgcag

SEQ ID NO: 452 - DNA, 18 bp, synthetic construct
  misc_feature 1..18: note = Description of Sequence: Synthetic oligonucleotide
  source 1..18: mol_type = other DNA
aaaatataaatatatttc

SEQ ID NO: 453-454 - skipped (2 entries)

SEQ ID NO: 455 - DNA, 15 bp, synthetic construct
  misc_feature 1..15: note = Description of Sequence: Synthetic oligonucleotide
  source 1..15: mol_type = other DNA
aattcttcggaatgt

SEQ ID NO: 456-460 - skipped (5 entries)

SEQ ID NO: 461 - DNA, 20 bp, synthetic construct
  misc_feature 1..20: note = Description of Sequence: Synthetic oligonucleotide
  source 1..20: mol_type = other DNA
caggcgggttctgcccgcgc

SEQ ID NO: 462 - DNA, 18 bp, synthetic construct
  misc_feature 1..18: note = Description of Sequence: Synthetic oligonucleotide
  source 1..18: mol_type = other DNA
catacctgcaagggtatc

SEQ ID NO: 463 - DNA, 15 bp, synthetic construct
  misc_feature 1..15: note = Description of Sequence: Synthetic oligonucleotide
  source 1..15: mol_type = other DNA
cgaccgcaaggttgt

SEQ ID NO: 464 - DNA, 15 bp, synthetic construct
  misc_feature 1..15: note = Description of Sequence: Synthetic oligonucleotide
  source 1..15: mol_type = other DNA
cgaccttgcggtcat

SEQ ID NO: 465 - DNA, 18 bp, synthetic construct
  misc_feature 1..18: note = Description of Sequence: Synthetic oligonucleotide
  source 1..18: mol_type = other DNA
cgatgctaatcacatcgt

SEQ ID NO: 466 - DNA, 15 bp, synthetic construct
  misc_feature 1..15: note = Description of Sequence: Synthetic oligonucleotide
  source 1..15: mol_type = other DNA
cgatggtgacatcat

SEQ ID NO: 467 - DNA, 16 bp, synthetic construct
  misc_feature 1..16: note = Description of Sequence: Synthetic oligonucleotide
  source 1..16: mol_type = other DNA
cgatggtttacatcgt

SEQ ID NO: 468 - DNA, 13 bp, synthetic construct
  misc_feature 1..13: note = Description of Sequence: Synthetic oligonucleotide
  source 1..13: mol_type = other DNA
cgccgtaaggtgt

SEQ ID NO: 469 - DNA, 12 bp, synthetic construct
  misc_feature 1..12: note = Description of Sequence: Synthetic oligonucleotide
  source 1..12: mol_type = other DNA
cgccttaggtgt

SEQ ID NO: 470 - DNA, 15 bp, synthetic construct
  misc_feature 1..15: note = Description of Sequence: Synthetic oligonucleotide
  source 1..15: mol_type = other DNA
cgcctttcgacgcgt

SEQ ID NO: 471 - DNA, 13 bp, synthetic construct
  misc_feature 1..13: note = Description of Sequence: Synthetic oligonucleotide
  source 1..13: mol_type = other DNA
cgcttcacggcgt

SEQ ID NO: 472 - DNA, 15 bp, synthetic construct
  misc_feature 1..15: note = Description of Sequence: Synthetic oligonucleotide
  source 1..15: mol_type = other DNA
cggcagcaatgctgt

SEQ ID NO: 473 - DNA, 13 bp, synthetic construct
  misc_feature 1..13: note = Description of Sequence: Synthetic oligonucleotide
  source 1..13: mol_type = other DNA
cggctccgccttc

SEQ ID NO: 474 - DNA, 16 bp, synthetic construct
  misc_feature 1..16: note = Description of Sequence: Synthetic oligonucleotide
  source 1..16: mol_type = other DNA
cgggtatcacagggtc

SEQ ID NO: 475 - DNA, 17 bp, synthetic construct
  misc_feature 1..17: note = Description of Sequence: Synthetic oligonucleotide
  source 1..17: mol_type = other DNA
cggtgcgcaagcgctgt

SEQ ID NO: 476 - DNA, 18 bp, synthetic construct
  misc_feature 1..18: note = Description of Sequence: Synthetic oligonucleotide
  source 1..18: mol_type = other DNA
cgtacgggtgaccgtacc

SEQ ID NO: 477 - DNA, 13 bp, synthetic construct
  misc_feature 1..13: note = Description of Sequence: Synthetic oligonucleotide
  source 1..13: mol_type = other DNA
cgtcaaagacttc

SEQ ID NO: 478 - DNA, 13 bp, synthetic construct
  misc_feature 1..13: note = Description of Sequence: Synthetic oligonucleotide
  source 1..13: mol_type = other DNA
cgtcgtaagactt

SEQ ID NO: 479 - DNA, 14 bp, synthetic construct
  misc_feature 1..14: note = Description of Sequence: Synthetic oligonucleotide
  source 1..14: mol_type = other DNA
cgttgaataaacgt

SEQ ID NO: 480-485 - skipped (6 entries)

SEQ ID NO: 486 - DNA, 19 bp, synthetic construct
  misc_feature 1..19: note = Description of Sequence: Synthetic oligonucleotide
  source 1..19: mol_type = other DNA
taactagatactttcagat

SEQ ID NO: 487 - DNA, 15 bp, synthetic construct
  misc_feature 1..15: note = Description of Sequence: Synthetic oligonucleotide
  source 1..15: mol_type = other DNA
tactcgtatgggtgc

SEQ ID NO: 488 - DNA, 13 bp, synthetic construct
  misc_feature 1..13: note = Description of Sequence: Synthetic oligonucleotide
  source 1..13: mol_type = other DNA
tactttgcggtgt

SEQ ID NO: 489 - DNA, 19 bp, synthetic construct
  misc_feature 1..19: note = Description of Sequence: Synthetic oligonucleotide
  source 1..19: mol_type = other DNA
taggcgagtaacatcgtgc

SEQ ID NO: 490 - DNA, 19 bp, synthetic construct
  misc_feature 1..19: note = Description of Sequence: Synthetic oligonucleotide
  source 1..19: mol_type = other DNA
taggcgtgaatagcgcctc

SEQ ID NO: 491 - DNA, 19 bp, synthetic construct
  misc_feature 1..19: note = Description of Sequence: Synthetic oligonucleotide
  source 1..19: mol_type = other DNA
taggtcgcgagagcggcgc

SEQ ID NO: 492 - DNA, 19 bp, synthetic construct
  misc_feature 1..19: note = Description of Sequence: Synthetic oligonucleotide
  source 1..19: mol_type = other DNA
taggtcgcgtaagcggcgc

SEQ ID NO: 493 - DNA, 17 bp, synthetic construct
  misc_feature 1..17: note = Description of Sequence: Synthetic oligonucleotide
  source 1..17: mol_type = other DNA
taggtggttatccacgc

SEQ ID NO: 494-495 - skipped (2 entries)

SEQ ID NO: 496 - DNA, 18 bp, synthetic construct
  misc_feature 1..18: note = Description of Sequence: Synthetic oligonucleotide
  source 1..18: mol_type = other DNA
tatacgtgaaagcgtatc

SEQ ID NO: 497 - DNA, 21 bp, synthetic construct
  misc_feature 1..21: note = Description of Sequence: Synthetic oligonucleotide
  source 1..21: mol_type = other DNA
tatagggtcaaaaactctatc

SEQ ID NO: 498 - DNA, 20 bp, synthetic construct
  misc_feature 1..20: note = Description of Sequence: Synthetic oligonucleotide
  source 1..20: mol_type = other DNA
tatgcagaaatacctgcatc

SEQ ID NO: 499 - DNA, 15 bp, synthetic construct
  misc_feature 1..15: note = Description of Sequence: Synthetic oligonucleotide
  source 1..15: mol_type = other DNA
tccccatacgggggc

SEQ ID NO: 500 - DNA, 14 bp, synthetic construct
  misc_feature 1..14: note = Description of Sequence: Synthetic oligonucleotide
  source 1..14: mol_type = other DNA
tcccgaaggggttc

SEQ ID NO: 501 - DNA, 15 bp, synthetic construct
  misc_feature 1..15: note = Description of Sequence: Synthetic oligonucleotide
  source 1..15: mol_type = other DNA
tctacgtatgtgggc

SEQ ID NO: 502 - DNA, 14 bp, synthetic construct
  misc_feature 1..14: note = Description of Sequence: Synthetic oligonucleotide
  source 1..14: mol_type = other DNA
tctcataggagttc

SEQ ID NO: 503 - DNA, 14 bp, synthetic construct
  misc_feature 1..14: note = Description of Sequence: Synthetic oligonucleotide
  source 1..14: mol_type = other DNA
tctcctctggaggc

SEQ ID NO: 504 - DNA, 15 bp, synthetic construct
  misc_feature 1..15: note = Description of Sequence: Synthetic oligonucleotide
  source 1..15: mol_type = other DNA
tcttagcaataaggt

SEQ ID NO: 505 - DNA, 14 bp, synthetic construct
  misc_feature 1..14: note = Description of Sequence: Synthetic oligonucleotide
  source 1..14: mol_type = other DNA
tcttgtaggagttc

SEQ ID NO: 506 - DNA, 15 bp, synthetic construct
  misc_feature 1..15: note = Description of Sequence: Synthetic oligonucleotide
  source 1..15: mol_type = other DNA
tgaacgtaagttcgc

SEQ ID NO: 507 - DNA, 16 bp, synthetic construct
  misc_feature 1..16: note = Description of Sequence: Synthetic oligonucleotide
  source 1..16: mol_type = other DNA
tgaactgcgaggttcc

SEQ ID NO: 508 - skipped

SEQ ID NO: 509 - DNA, 15 bp, synthetic construct
  misc_feature 1..15: note = Description of Sequence: Synthetic oligonucleotide
  source 1..15: mol_type = other DNA
tgaccgaaaggtcgt

SEQ ID NO: 510 - DNA, 15 bp, synthetic construct
  misc_feature 1..15: note = Description of Sequence: Synthetic oligonucleotide
  source 1..15: mol_type = other DNA
tgaccgcaaggtcgt

SEQ ID NO: 511 - DNA, 14 bp, synthetic construct
  misc_feature 1..14: note = Description of Sequence: Synthetic oligonucleotide
  source 1..14: mol_type = other DNA
tgagctctgctctc

SEQ ID NO: 512 - DNA, 18 bp, synthetic construct
  misc_feature 1..18: note = Description of Sequence: Synthetic oligonucleotide
  source 1..18: mol_type = other DNA
tgaggcctcacggcctac

SEQ ID NO: 513 - DNA, 15 bp, synthetic construct
  misc_feature 1..15: note = Description of Sequence: Synthetic oligonucleotide
  source 1..15: mol_type = other DNA
tgagggcaacttcgt

SEQ ID NO: 514 - DNA, 16 bp, synthetic construct
  misc_feature 1..16: note = Description of Sequence: Synthetic oligonucleotide
  source 1..16: mol_type = other DNA
tgagggtcatacctcc

SEQ ID NO: 515 - DNA, 18 bp, synthetic construct
  misc_feature 1..18: note = Description of Sequence: Synthetic oligonucleotide
  source 1..18: mol_type = other DNA
tgagggtgcaaatcctcc

SEQ ID NO: 516 - DNA, 13 bp, synthetic construct
  misc_feature 1..13: note = Description of Sequence: Synthetic oligonucleotide
  source 1..13: mol_type = other DNA
tgccgaaaggcgt

SEQ ID NO: 517 - DNA, 13 bp, synthetic construct
  misc_feature 1..13: note = Description of Sequence: Synthetic oligonucleotide
  source 1..13: mol_type = other DNA
tgccgtaaggcgt

SEQ ID NO: 518 - DNA, 14 bp, synthetic construct
  misc_feature 1..14: note = Description of Sequence: Synthetic oligonucleotide
  source 1..14: mol_type = other DNA
tgcggtctccgcgc

SEQ ID NO: 519 - DNA, 11 bp, synthetic construct
  misc_feature 1..11: note = Description of Sequence: Synthetic oligonucleotide
  source 1..11: mol_type = other DNA
tgctagagcat

SEQ ID NO: 520 - DNA, 16 bp, synthetic construct
  misc_feature 1..16: note = Description of Sequence: Synthetic oligonucleotide
  source 1..16: mol_type = other DNA
tgctcgtatagagctc

SEQ ID NO: 521 - DNA, 15 bp, synthetic construct
  misc_feature 1..15: note = Description of Sequence: Synthetic oligonucleotide
  source 1..15: mol_type = other DNA
tggacaattgtctgc

SEQ ID NO: 522 - DNA, 15 bp, synthetic construct
  misc_feature 1..15: note = Description of Sequence: Synthetic oligonucleotide
  source 1..15: mol_type = other DNA
tggacagatgtccgt

SEQ ID NO: 523 - DNA, 15 bp, synthetic construct
  misc_feature 1..15: note = Description of Sequence: Synthetic oligonucleotide
  source 1..15: mol_type = other DNA
tggacaggtgtccgc

SEQ ID NO: 524 - DNA, 15 bp, synthetic construct
  misc_feature 1..15: note = Description of Sequence: Synthetic oligonucleotide
  source 1..15: mol_type = other DNA
tggacggttgtccgc

SEQ ID NO: 525 - DNA, 13 bp, synthetic construct
  misc_feature 1..13: note = Description of Sequence: Synthetic oligonucleotide
  source 1..13: mol_type = other DNA
tggacttgtggtc

SEQ ID NO: 526 - DNA, 16 bp, synthetic construct
  misc_feature 1..16: note = Description of Sequence: Synthetic oligonucleotide
  source 1..16: mol_type = other DNA
tggagattctctccgc

SEQ ID NO: 527 - DNA, 14 bp, synthetic construct
  misc_feature 1..14: note = Description of Sequence: Synthetic oligonucleotide
  source 1..14: mol_type = other DNA
tggcataggcctgc

SEQ ID NO: 528 - DNA, 14 bp, synthetic construct
  misc_feature 1..14: note = Description of Sequence: Synthetic oligonucleotide
  source 1..14: mol_type = other DNA
tggcttatgtctac

SEQ ID NO: 529 - DNA, 16 bp, synthetic construct
  misc_feature 1..16: note = Description of Sequence: Synthetic oligonucleotide
  source 1..16: mol_type = other DNA
tgggagttaatcccgt

SEQ ID NO: 530 - DNA, 14 bp, synthetic construct
  misc_feature 1..14: note = Description of Sequence: Synthetic oligonucleotide
  source 1..14: mol_type = other DNA
tgggatcttcccgc

SEQ ID NO: 531 - DNA, 16 bp, synthetic construct
  misc_feature 1..16: note = Description of Sequence: Synthetic oligonucleotide
  source 1..16: mol_type = other DNA
tgggcagaaatgtctc

SEQ ID NO: 532 - DNA, 15 bp, synthetic construct
  misc_feature 1..15: note = Description of Sequence: Synthetic oligonucleotide
  source 1..15: mol_type = other DNA
tgggcgttcgcccgc

SEQ ID NO: 533 - DNA, 14 bp, synthetic construct
  misc_feature 1..14: note = Description of Sequence: Synthetic oligonucleotide
  source 1..14: mol_type = other DNA
tgggcttcgcccgc

SEQ ID NO: 534 - DNA, 16 bp, synthetic construct
  misc_feature 1..16: note = Description of Sequence: Synthetic oligonucleotide
  source 1..16: mol_type = other DNA
tgggggataaccccgt

SEQ ID NO: 535 - DNA, 15 bp, synthetic construct
  misc_feature 1..15: note = Description of Sequence: Synthetic oligonucleotide
  source 1..15: mol_type = other DNA
tgggggtttccccgt

SEQ ID NO: 536 - skipped

SEQ ID NO: 537 - DNA, 15 bp, synthetic construct
  misc_feature 1..15: note = Description of Sequence: Synthetic oligonucleotide
  source 1..15: mol_type = other DNA
tggtggcaacaccgt

SEQ ID NO: 538 - DNA, 14 bp, synthetic construct
  misc_feature 1..14: note = Description of Sequence: Synthetic oligonucleotide
  source 1..14: mol_type = other DNA
tggtttatagccgt

SEQ ID NO: 539 - DNA, 19 bp, synthetic construct
  misc_feature 1..19: note = Description of Sequence: Synthetic oligonucleotide
  source 1..19: mol_type = other DNA
tgtacggtaataccgtacc

SEQ ID NO: 540 - DNA, 15 bp, synthetic construct
  misc_feature 1..15: note = Description of Sequence: Synthetic oligonucleotide
  source 1..15: mol_type = other DNA
tgtccgcaaggacgt

SEQ ID NO: 541 - DNA, 15 bp, synthetic construct
  misc_feature 1..15: note = Description of Sequence: Synthetic oligonucleotide
  source 1..15: mol_type = other DNA
tgtcctaacggacgt

SEQ ID NO: 542 - DNA, 18 bp, synthetic construct
  misc_feature 1..18: note = Description of Sequence: Synthetic oligonucleotide
  source 1..18: mol_type = other DNA
tgtcctattaacggacgt

SEQ ID NO: 543 - DNA, 16 bp, synthetic construct
  misc_feature 1..16: note = Description of Sequence: Synthetic oligonucleotide
  source 1..16: mol_type = other DNA
tgtccttcacgggcgt

SEQ ID NO: 544 - DNA, 13 bp, synthetic construct
  misc_feature 1..13: note = Description of Sequence: Synthetic oligonucleotide
  source 1..13: mol_type = other DNA
tgtcttaggacgt

SEQ ID NO: 545 - DNA, 18 bp, synthetic construct
  misc_feature 1..18: note = Description of Sequence: Synthetic oligonucleotide
  source 1..18: mol_type = other DNA
tgtgcgttaacgcgtacc

SEQ ID NO: 546 - DNA, 16 bp, synthetic construct
  misc_feature 1..16: note = Description of Sequence: Synthetic oligonucleotide
  source 1..16: mol_type = other DNA
tgtgtcgcaaggcacc

SEQ ID NO: 547 - DNA, 15 bp, synthetic construct
  misc_feature 1..15: note = Description of Sequence: Synthetic oligonucleotide
  source 1..15: mol_type = other DNA
tgttcgtaaggactt

SEQ ID NO: 548 - DNA, 16 bp, synthetic construct
  misc_feature 1..16: note = Description of Sequence: Synthetic oligonucleotide
  source 1..16: mol_type = other DNA
ttcacagaaatgtgtc

SEQ ID NO: 549 - DNA, 14 bp, synthetic construct
  misc_feature 1..14: note = Description of Sequence: Synthetic oligonucleotide
  source 1..14: mol_type = other DNA
ttccctcgtggagt

SEQ ID NO: 550 - DNA, 14 bp, synthetic construct
  misc_feature 1..14: note = Description of Sequence: Synthetic oligonucleotide
  source 1..14: mol_type = other DNA
ttccctctgggagc

SEQ ID NO: 551 - DNA, 14 bp, synthetic construct
  misc_feature 1..14: note = Description of Sequence: Synthetic oligonucleotide
  source 1..14: mol_type = other DNA
ttcccttgtggatc

SEQ ID NO: 552 - DNA, 13 bp, synthetic construct
  misc_feature 1..13: note = Description of Sequence: Synthetic oligonucleotide
  source 1..13: mol_type = other DNA
ttccttcgggagc

SEQ ID NO: 553 - DNA, 15 bp, synthetic construct
  misc_feature 1..15: note = Description of Sequence: Synthetic oligonucleotide
  source 1..15: mol_type = other DNA
ttctagcaatagagt

SEQ ID NO: 554 - DNA, 16 bp, synthetic construct
  misc_feature 1..16: note = Description of Sequence: Synthetic oligonucleotide
  source 1..16: mol_type = other DNA
ttctccactggggagc

SEQ ID NO: 555 - DNA, 15 bp, synthetic construct
  misc_feature 1..15: note = Description of Sequence: Synthetic oligonucleotide
  source 1..15: mol_type = other DNA
ttctcgagagggagc

SEQ ID NO: 556 - DNA, 15 bp, synthetic construct
  misc_feature 1..15: note = Description of Sequence: Synthetic oligonucleotide
  source 1..15: mol_type = other DNA
ttctcgtatgagagc

SEQ ID NO: 557 - DNA, 19 bp, synthetic construct
  misc_feature 1..19: note = Description of Sequence: Synthetic oligonucleotide
  source 1..19: mol_type = other DNA
tttaaggttttcccttaac

SEQ ID NO: 558 - DNA, 14 bp, synthetic construct
  misc_feature 1..14: note = Description of Sequence: Synthetic oligonucleotide
  source 1..14: mol_type = other DNA
tttcattgtggagt

SEQ ID NO: 559 - DNA, 14 bp, synthetic construct
  misc_feature 1..14: note = Description of Sequence: Synthetic oligonucleotide
  source 1..14: mol_type = other DNA
tttcgaaggaatcc

SEQ ID NO: 560 - DNA, 13 bp, synthetic construct
  misc_feature 1..13: note = Description of Sequence: Synthetic oligonucleotide
  source 1..13: mol_type = other DNA
tttcttcggaagc

SEQ ID NO: 561 - DNA, 16 bp, synthetic construct
  misc_feature 1..16: note = Description of Sequence: Synthetic oligonucleotide
  source 1..16: mol_type = other DNA
tttggggcaactcaac

SEQ ID NO: 562 - RNA, 342 nt, synthetic construct
  misc_feature 1..342: note = Description of Sequence: Synthetic polynucleotide
  variation 5..6: note = a, c, u, or g
  variation 15..16: note = a, c, u, or g
  variation 21: note = a, c, u, or g
  variation 30..32: note = a, c, u, or g
  variation 34: note = a, c, u, or g
  variation 37: note = a, c, u, or g
  variation 41..45: note = a, c, u, or g
  misc_feature 47..317: note = This region may encompass 1-271 nucleotides
  variation 47..320: note = a, c, u, or g
  variation 328..329: note = a, c, u, or g
  variation 333..334: note = a, c, u, or g
  variation 336..337: note = a, c, u, or g
  variation 1..342: note = May or may not be present
  misc_feature 1..342: note = See specification as filed for detailed description of substitutions and preferred embodiments
  source 1..342: mol_type = other RNA
rkssnndtrghbyannytgrndgwdvdydnnnbnhbnryrnnnnndnnnnnnnnnnnnnnnnnnnnnnnnnnnnnnnnnnnnnnnnnnnnnnnnnnnnnnnnnnnnnnnnnnnnnnnnnnnnnnnnnnnnnnnnnnnnnnnnnnnnnnnnnnnnnnnnnnnnnnnnnnnnnnnnnnnnnnnnnnnnnnnnnnnnnnnnnnnnnnnnnnnnnnnnnnnnnnnnnnnnnnnnnnnnnnnnnnnnnnnnnnnnnnnnnnnnnnnnnnnnnnnnnnnnnnnnnnnnnnnnnnnnnnnnnnnnnnnnnnnnnnnnnnnnnnnnnnrrdtyrannyybnnhnnbwccd

SEQ ID NO: 563 - RNA, 341 nt, synthetic construct
  misc_feature 1..341: note = Description of Sequence: Synthetic polynucleotide
  variation 16: note = a, c, u, or g
  variation 30: note = a, c, u, or g
  variation 46..316: note = a, c, u, or g
  misc_feature 46..316: note = This region may encompass 1-271 nucleotides
  variation 319: note = a, c, u, or g
  variation 328: note = a, c, u, or g
  variation 1..341: note = May or may not be present
  misc_feature 1..341: note = See specification as filed for detailed description of substitutions and preferred embodiments
  source 1..341: mol_type = other RNA
rksgrwdkrghbyavnyggtdgarvrydynhkywbhryrhdhdhrnnnnnnnnnnnnnnnnnnnnnnnnnnnnnnnnnnnnnnnnnnnnnnnnnnnnnnnnnnnnnnnnnnnnnnnnnnnnnnnnnnnnnnnnnnnnnnnnnnnnnnnnnnnnnnnnnnnnnnnnnnnnnnnnnnnnnnnnnnnnnnnnnnnnnnnnnnnnnnnnnnnnnnnnnnnnnnnnnnnnnnnnnnnnnnnnnnnnnnnnnnnnnnnnnnnnnnnnnnnnnnnnnnnnnnnnnnnnnnnnnnnnnnnnnnnnnnnnnnnnnnnnnnnnnnnbhnrgdtcrayncyydvhhyywccd

SEQ ID NO: 564 - RNA, 341 nt, synthetic construct
  misc_feature 1..341: note = Description of Sequence: Synthetic polynucleotide
  variation 16: note = a, c, u, or g
  variation 30: note = a, c, u, or g
  variation 46..316: note = a, c, u, or g
  misc_feature 46..316: note = This region may encompass 1-271 nucleotides
  variation 319: note = a, c, u, or g
  variation 1..341: note = May or may not be present
  misc_feature 1..341: note = See specification as filed for detailed description of substitutions and preferred embodiments
  source 1..341: mol_type = other RNA
ggggrwdtrghbyavnyggtdgarvrydynhkywkhryrhdhdhrnnnnnnnnnnnnnnnnnnnnnnnnnnnnnnnnnnnnnnnnnnnnnnnnnnnnnnnnnnnnnnnnnnnnnnnnnnnnnnnnnnnnnnnnnnnnnnnnnnnnnnnnnnnnnnnnnnnnnnnnnnnnnnnnnnnnnnnnnnnnnnnnnnnnnnnnnnnnnnnnnnnnnnnnnnnnnnnnnnnnnnnnnnnnnnnnnnnnnnnnnnnnnnnnnnnnnnnnnnnnnnnnnnnnnnnnnnnnnnnnnnnnnnnnnnnnnnnnnnnnnnnnnnnnnnnbhnrgdtcraybccydvhhyytcca

SEQ ID NO: 565 - RNA, 343 nt, synthetic construct
  misc_feature 1..343: note = Description of Sequence: Synthetic polynucleotide
  variation 2..8: note = a, c, u, or g
  variation 12..13: note = a, c, u, or g
  variation 17: note = a, c, u, or g
  variation 22..24: note = a, c, u, or g
  variation 26..27: note = a, c, u, or g
  variation 30..35: note = a, c, u, or g
  variation 38: note = a, c, u, or g
  variation 43: note = a, c, u, or g
  variation 45..322: note = a, c, u, or g
  misc_feature 48..318: note = This region may encompass 1-271 nucleotides
  variation 329: note = a, c, u, or g
  variation 333..342: note = a, c, u, or g
  variation 1..343: note = May or may not be present
  misc_feature 1..343: note = See specification as filed for detailed description of substitutions and preferred embodiments
  source 1..343: mol_type = other RNA
gnnnnnnnkvgnnhddnhwrrnnnrnnvynnnnnnbtnckrhnbnnnnnnnnnnnnnnnnnnnnnnnnnnnnnnnnnnnnnnnnnnnnnnnnnnnnnnnnnnnnnnnnnnnnnnnnnnnnnnnnnnnnnnnnnnnnnnnnnnnnnnnnnnnnnnnnnnnnnnnnnnnnnnnnnnnnnnnnnnnnnnnnnnnnnnnnnnnnnnnnnnnnnnnnnnnnnnnnnnnnnnnnnnnnnnnnnnnnnnnnnnnnnnnnnnnnnnnnnnnnnnnnnnnnnnnnnnnnnnnnnnnnnnnnnnnnnnnnnnnnnnnnnnnnnnnnnnnnnngttyranyybnnnnnnnnnnd

SEQ ID NO: 566 - RNA, 342 nt, synthetic construct
  misc_feature 1..342: note = Description of Sequence: Synthetic polynucleotide
  variation 3: note = a, c, u, or g
  variation 6..7: note = a, c, u, or g
  variation 13: note = a, c, u, or g
  variation 26: note = a, c, u, or g
  variation 32: note = a, c, u, or g
  variation 37: note = a, c, u, or g
  variation 44: note = a, c, u, or g
  variation 47..317: note = a, c, u, or g
  misc_feature 47..317: note = This region may encompass 1-271 nucleotides
  variation 328: note = a, c, u, or g
  variation 336..338: note = a, c, u, or g
  variation 340: note = a, c, u, or g
  variation 1..342: note = May or may not be present
  misc_feature 1..342: note = See specification as filed for detailed description of substitutions and preferred embodiments
  source 1..342: mol_type = other RNA
grnvbnnvkbgbnydrwtrgwygarnrydyynsvytnckrmkbnrrnnnnnnnnnnnnnnnnnnnnnnnnnnnnnnnnnnnnnnnnnnnnnnnnnnnnnnnnnnnnnnnnnnnnnnnnnnnnnnnnnnnnnnnnnnnnnnnnnnnnnnnnnnnnnnnnnnnnnnnnnnnnnnnnnnnnnnnnnnnnnnnnnnnnnnnnnnnnnnnnnnnnnnnnnnnnnnnnnnnnnnnnnnnnnnnnnnnnnnnnnnnnnnnnnnnnnnnnnnnnnnnnnnnnnnnnnnnnnnnnnnnnnnnnnnnnnnnnnnnnnnnnnnnnnnnshvggttyrantycbdbynnnbnhr

SEQ ID NO: 567 - RNA, 342 nt, synthetic construct
  misc_feature 1..342: note = Description of Sequence: Synthetic polynucleotide
  variation 3: note = a, c, u, or g
  variation 7: note = a, c, u, or g
  variation 47..317: note = a, c, u, or g
  misc_feature 47..317: note = This region may encompass 1-271 nucleotides
  variation 336: note = a, c, u, or g
  variation 340: note = a, c, u, or g
  variation 1..342: note = May or may not be present
  misc_feature 1..342: note = See specification as filed for detailed description of substitutions and preferred embodiments
  source 1..342: mol_type = other RNA
grnvyvnskkgssydawtggaygarsgyryykgmythckrakymrrnnnnnnnnnnnnnnnnnnnnnnnnnnnnnnnnnnnnnnnnnnnnnnnnnnnnnnnnnnnnnnnnnnnnnnnnnnnnnnnnnnnnnnnnnnnnnnnnnnnnnnnnnnnnnnnnnnnnnnnnnnnnnnnnnnnnnnnnnnnnnnnnnnnnnnnnnnnnnnnnnnnnnnnnnnnnnnnnnnnnnnnnnnnnnnnnnnnnnnnnnnnnnnnnnnnnnnnnnnnnnnnnnnnnnnnnnnnnnnnnnnnnnnnnnnnnnnnnnnnnnnnnnnnnnnnshrggttygavtycydbynbdbnyg

SEQ ID NO: 568 - RNA, 341 nt, synthetic construct
  misc_feature 1..341: note = Description of Sequence: Synthetic polynucleotide
  variation 2: note = a, c, u, or g
  variation 4..6: note = a, c, u, or g
  variation 12: note = a, c, u, or g
  variation 17: note = a, c, u, or g
  variation 25: note = a, c, u, or g
  variation 28..30: note = a, c, u, or g
  variation 43..316: note = a, c, u, or g
  misc_feature 46..316: note = This region may encompass 1-271 nucleotides
  variation 318..319: note = a, c, u, or g
  variation 327: note = a, c, u, or g
  variation 331..332: note = a, c, u, or g
  variation 334..337: note = a, c, u, or g
  variation 339..340: note = a, c, u, or g
  variation 1..341: note = May or may not be present
  misc_feature 1..341: note = See specification as filed for detailed description of substitutions and preferred embodiments
  source 1..341: mol_type = other RNA
dnynnndtrghnhvrynggbhtrdnrynnnbsryyrttwahbnnnnnnnnnnnnnnnnnnnnnnnnnnnnnnnnnnnnnnnnnnnnnnnnnnnnnnnnnnnnnnnnnnnnnnnnnnnnnnnnnnnnnnnnnnnnnnnnnnnnnnnnnnnnnnnnnnnnnnnnnnnnnnnnnnnnnnnnnnnnnnnnnnnnnnnnnnnnnnnnnnnnnnnnnnnnnnnnnnnnnnnnnnnnnnnnnnnnnnnnnnnnnnnnnnnnnnnnnnnnnnnnnnnnnnnnnnnnnnnnnnnnnnnnnnnnnnnnnnnnnnnnnnnnnnnnnnvnnrgtkhvwnhcynnbnnnndnnr

SEQ ID NO: 569 - RNA, 341 nt, synthetic construct
  misc_feature 1..341: note = Description of Sequence: Synthetic polynucleotide
  variation 17: note = a, c, u, or g
  variation 28: note = a, c, u, or g
  variation 46..316: note = a, c, u, or g
  misc_feature 46..316: note = This region may encompass 1-271 nucleotides
  variation 1..341: note = May or may not be present
  misc_feature 1..341: note = See specification as filed for detailed description of substitutions and preferred embodiments
  source 1..341: mol_type = other RNA
rtytcygtrghryvrtnggbytarhgcnttysryyrttwahbddannnnnnnnnnnnnnnnnnnnnnnnnnnnnnnnnnnnnnnnnnnnnnnnnnnnnnnnnnnnnnnnnnnnnnnnnnnnnnnnnnnnnnnnnnnnnnnnnnnnnnnnnnnnnnnnnnnnnnnnnnnnnnnnnnnnnnnnnnnnnnnnnnnnnnnnnnnnnnnnnnnnnnnnnnnnnnnnnnnnnnnnnnnnnnnnnnnnnnnnnnnnnnnnnnnnnnnnnnnnnnnnnnnnnnnnnnnnnnnnnnnnnnnnnnnnnnnnnnnnnnnnnnnnnnnrgtrgtkhvwdmcyayysvrrrrbr

SEQ ID NO: 570 - RNA, 341 nt, synthetic construct
  misc_feature 1..341: note = Description of Sequence: Synthetic polynucleotide
  variation 46..316: note = a, c, u, or g
  misc_feature 46..316: note = This region may encompass 1-271 nucleotides
  variation 1..341: note = May or may not be present
  misc_feature 1..341: note = See specification as filed for detailed description of substitutions and preferred embodiments
  source 1..341: mol_type = other RNA
rtytcygtrghryvrtbggbytaghgcbttysryyrttaahyddannnnnnnnnnnnnnnnnnnnnnnnnnnnnnnnnnnnnnnnnnnnnnnnnnnnnnnnnnnnnnnnnnnnnnnnnnnnnnnnnnnnnnnnnnnnnnnnnnnnnnnnnnnnnnnnnnnnnnnnnnnnnnnnnnnnnnnnnnnnnnnnnnnnnnnnnnnnnnnnnnnnnnnnnnnnnnnnnnnnnnnnnnnnnnnnnnnnnnnnnnnnnnnnnnnnnnnnnnnnnnnnnnnnnnnnnnnnnnnnnnnnnnnnnnnnnnnnnnnnnnnnnnnnnnnrgtrgtkhvwdmcyayysvrrrryg

SEQ ID NO: 571 - RNA, 342 nt, synthetic construct
  misc_feature 1..342: note = Description of Sequence: Synthetic polynucleotide
  variation 2..6: note = a, c, u, or g
  variation 12: note = a, c, u, or g
  variation 16: note = a, c, u, or g
  variation 22: note = a, c, u, or g
  variation 26: note = a, c, u, or g
  variation 29: note = a, c, u, or g
  variation 31..32: note = a, c, u, or g
  variation 44: note = a, c, u, or g
  misc_feature 47..317: note = This region may encompass 1-271 nucleotides
  variation 47..319: note = a, c, u, or g
  variation 328: note = a, c, u, or g
  variation 333..334: note = a, c, u, or g
  variation 336..339: note = a, c, u, or g
  variation 1..342: note = May or may not be present
  misc_feature 1..342: note = See specification as filed for detailed description of substitutions and preferred embodiments
  source 1..342: mol_type = other RNA
knnnnndyrrynhrrnyygrhntmdnrynbnnvhytrtcrhdbnbvnnnnnnnnnnnnnnnnnnnnnnnnnnnnnnnnnnnnnnnnnnnnnnnnnnnnnnnnnnnnnnnnnnnnnnnnnnnnnnnnnnnnnnnnnnnnnnnnnnnnnnnnnnnnnnnnnnnnnnnnnnnnnnnnnnnnnnnnnnnnnnnnnnnnnnnnnnnnnnnnnnnnnnnnnnnnnnnnnnnnnnnnnnnnnnnnnnnnnnnnnnnnnnnnnnnnnnnnnnnnnnnnnnnnnnnnnnnnnnnnnnnnnnnnnnnnnnnnnnnnnnnnnnnnnnnnnsrgytbrhnyyysnnhnnnnbmr

SEQ ID NO: 572 - RNA, 339 nt, synthetic construct
  misc_feature 1..339: note = Description of Sequence: Synthetic polynucleotide
  variation 2: note = a, c, u, or g
  variation 6: note = a, c, u, or g
  variation 44..314: note = a, c, u, or g
  misc_feature 44..314: note = This region may encompass 1-271 nucleotides
  variation 333: note = a, c, u, or g
  variation 1..339: note = May or may not be present
  misc_feature 1..339: note = See specification as filed for detailed description of substitutions and preferred embodiments
  source 1..339: mol_type = other RNA
knsbbnwyarywyrgtggtkmgwrtbysyryytrtcaygbrsrnnnnnnnnnnnnnnnnnnnnnnnnnnnnnnnnnnnnnnnnnnnnnnnnnnnnnnnnnnnnnnnnnnnnnnnnnnnnnnnnnnnnnnnnnnnnnnnnnnnnnnnnnnnnnnnnnnnnnnnnnnnnnnnnnnnnnnnnnnnnnnnnnnnnnnnnnnnnnnnnnnnnnnnnnnnnnnnnnnnnnnnnnnnnnnnnnnnnnnnnnnnnnnnnnnnnnnnnnnnnnnnnnnnnnnnnnnnnnnnnnnnnnnnnnnnnnnnnnnnnnnnnnnnnnnnykgrgytbrhkyycchrwnvvksmr

SEQ ID NO: 573 - RNA, 339 nt, synthetic construct
  misc_feature 1..339: note = Description of Sequence: Synthetic polynucleotide
  variation 44..314: note = a, c, u, or g
  misc_feature 44..314: note = This region may encompass 1-271 nucleotides
  variation 1..339: note = May or may not be present
  misc_feature 1..339: note = See specification as filed for detailed description of substitutions and preferred embodiments
  source 1..339: mol_type = other RNA
tmctyrtyagtatrgtggtkmgtrtyycygyctgtcaygyggrnnnnnnnnnnnnnnnnnnnnnnnnnnnnnnnnnnnnnnnnnnnnnnnnnnnnnnnnnnnnnnnnnnnnnnnnnnnnnnnnnnnnnnnnnnnnnnnnnnnnnnnnnnnnnnnnnnnnnnnnnnnnnnnnnnnnnnnnnnnnnnnnnnnnnnnnnnnnnnnnnnnnnnnnnnnnnnnnnnnnnnnnnnnnnnnnnnnnnnnnnnnnnnnnnnnnnnnnnnnnnnnnnnnnnnnnnnnnnnnnnnnnnnnnnnnnnnnnnnnnnnnnnnnnnnnyggrgttyrmkyyccyrasrrggag

SEQ ID NO: 574 - RNA, 342 nt, synthetic construct
  misc_feature 1..342: note = Description of Sequence: Synthetic polynucleotide
  variation 3..6: note = a, c, u, or g
  variation 12..13: note = a, c, u, or g
  variation 16: note = a, c, u, or g
  variation 24: note = a, c, u, or g
  variation 26: note = a, c, u, or g
  variation 29..32: note = a, c, u, or g
  variation 34: note = a, c, u, or g
  variation 42: note = a, c, u, or g
  variation 44..319: note = a, c, u, or g
  misc_feature 47..317: note = This region may encompass 1-271 nucleotides
  variation 328: note = a, c, u, or g
  variation 333..334: note = a, c, u, or g
  variation 336..340: note = a, c, u, or g
  variation 1..342: note = May or may not be present
  misc_feature 1..342: note = See specification as filed for detailed description of substitutions and preferred embodiments
  source 1..342: mol_type = other RNA
gsnnnndtrvynnavnkcgdbyynrnvbnnnnvnyyrcarmnbnnnnnnnnnnnnnnnnnnnnnnnnnnnnnnnnnnnnnnnnnnnnnnnnnnnnnnnnnnnnnnnnnnnnnnnnnnnnnnnnnnnnnnnnnnnnnnnnnnnnnnnnnnnnnnnnnnnnnnnnnnnnnnnnnnnnnnnnnnnnnnnnnnnnnnnnnnnnnnnnnnnnnnnnnnnnnnnnnnnnnnnnnnnnnnnnnnnnnnnnnnnnnnnnnnnnnnnnnnnnnnnnnnnnnnnnnnnnnnnnnnnnnnnnnnnnnnnnnnnnnnnnnnnnnnnnnnnnbdrttcranyyyvnnhnnnnnyy

SEQ ID NO: 575 - RNA, 340 nt, synthetic construct
  misc_feature 1..340: note = Description of Sequence: Synthetic polynucleotide
  variation 16: note = a, c, u, or g
  variation 45..315: note = a, c, u, or g
  misc_feature 45..315: note = This region may encompass 1-271 nucleotides
  variation 1..340: note = May or may not be present
  misc_feature 1..340: note = See specification as filed for detailed description of substitutions and preferred embodiments
  source 1..340: mol_type = other RNA
gsgsryrkrgytbasnkgdktaravyahttgrcyrcaratcmarnnnnnnnnnnnnnnnnnnnnnnnnnnnnnnnnnnnnnnnnnnnnnnnnnnnnnnnnnnnnnnnnnnnnnnnnnnnnnnnnnnnnnnnnnnnnnnnnnnnnnnnnnnnnnnnnnnnnnnnnnnnnnnnnnnnnnnnnnnnnnnnnnnnnnnnnnnnnnnnnnnnnnnnnnnnnnnnnnnnnnnnnnnnnnnnnnnnnnnnnnnnnnnnnnnnnnnnnnnnnnnnnnnnnnnnnnnnnnnnnnnnnnnnnnnnnnnnnnnnnnnnnnnnnnnnyyydrttcrartyyvgktryychyy

SEQ ID NO: 576 - RNA, 340 nt, synthetic construct
  misc_feature 1..340: note = Description of Sequence: Synthetic polynucleotide
  variation 16: note = a, c, u, or g
  variation 45..315: note = a, c, u, or g
  misc_feature 45..315: note = This region may encompass 1-271 nucleotides
  variation 1..340: note = May or may not be present
  misc_feature 1..340: note = See specification as filed for detailed description of substitutions and preferred embodiments
  source 1..340: mol_type = other RNA
gggsryrkrgytyasntgrktagagcayttgactgcaratcmarnnnnnnnnnnnnnnnnnnnnnnnnnnnnnnnnnnnnnnnnnnnnnnnnnnnnnnnnnnnnnnnnnnnnnnnnnnnnnnnnnnnnnnnnnnnnnnnnnnnnnnnnnnnnnnnnnnnnnnnnnnnnnnnnnnnnnnnnnnnnnnnnnnnnnnnnnnnnnnnnnnnnnnnnnnnnnnnnnnnnnnnnnnnnnnnnnnnnnnnnnnnnnnnnnnnnnnnnnnnnnnnnnnnnnnnnnnnnnnnnnnnnnnnnnnnnnnnnnnnnnnnnnnnnnnnyyyrrttcraatyyvgktrcycmyy

SEQ ID NO: 577 - RNA, 341 nt, synthetic construct
  misc_feature 1..341: note = Description of Sequence: Synthetic polynucleotide
  variation 2: note = a, c, u, or g
  variation 4..6: note = a, c, u, or g
  variation 12..13: note = a, c, u, or g
  variation 16: note = a, c, u, or g
  variation 20..21: note = a, c, u, or g
  variation 24: note = a, c, u, or g
  variation 28..31: note = a, c, u, or g
  variation 33: note = a, c, u, or g
  variation 40..41: note = a, c, u, or g
  variation 43..319: note = a, c, u, or g
  misc_feature 46..316: note = This region may encompass 1-271 nucleotides
  variation 327: note = a, c, u, or g
  variation 331..332: note = a, c, u, or g
  variation 335..339: note = a, c, u, or g
  variation 1..341: note = May or may not be present
  misc_feature 1..341: note = See specification as filed for detailed description of substitutions and preferred embodiments
  source 1..341: mol_type = other RNA
dnbnnndtvgbnnarnhggnnhanvvynnnnvnytbtkrnnhnnnnnnnnnnnnnnnnnnnnnnnnnnnnnnnnnnnnnnnnnnnnnnnnnnnnnnnnnnnnnnnnnnnnnnnnnnnnnnnnnnnnnnnnnnnnnnnnnnnnnnnnnnnnnnnnnnnnnnnnnnnnnnnnnnnnnnnnnnnnnnnnnnnnnnnnnnnnnnnnnnnnnnnnnnnnnnnnnnnnnnnnnnnnnnnnnnnnnnnnnnnnnnnnnnnnnnnnnnnnnnnnnnnnnnnnnnnnnnnnnnnnnnnnnnnnnnnnnnnnnnnnnnnnnnnnnnnnnrrttyvanybynnbhnnnnnhd

SEQ ID NO: 578 - RNA, 340 nt, synthetic construct
  misc_feature 1..340: note = Description of Sequence: Synthetic polynucleotide
  variation 4..5: note = a, c, u, or g
  variation 12: note = a, c, u, or g
  variation 21: note = a, c, u, or g
  variation 27..28: note = a, c, u, or g
  misc_feature 45..315: note = This region may encompass 1-271 nucleotides
  variation 45..317: note = a, c, u, or g
  variation 331: note = a, c, u, or g
  variation 335..336: note = a, c, u, or g
  variation 1..340: note = May or may not be present
  misc_feature 1..340: note = See specification as filed for detailed description of substitutions and preferred embodiments
  source 1..340: mol_type = other RNA
kdbnnydtggynbarkmggdnavvrynnhbvrytbtkrrbhvdvnnnnnnnnnnnnnnnnnnnnnnnnnnnnnnnnnnnnnnnnnnnnnnnnnnnnnnnnnnnnnnnnnnnnnnnnnnnnnnnnnnnnnnnnnnnnnnnnnnnnnnnnnnnnnnnnnnnnnnnnnnnnnnnnnnnnnnnnnnnnnnnnnnnnnnnnnnnnnnnnnnnnnnnnnnnnnnnnnnnnnnnnnnnnnnnnnnnnnnnnnnnnnnnnnnnnnnnnnnnnnnnnnnnnnnnnnnnnnnnnnnnnnnnnnnnnnnnnnnnnnnnnnnnnnnnnndrrttyvadybyhnbhdnnvhmd

SEQ ID NO: 579 - RNA, 340 nt, synthetic construct
  misc_feature 1..340: note = Description of Sequence: Synthetic polynucleotide
  variation 4: note = a, c, u, or g
  variation 21: note = a, c, u, or g
  variation 27..28: note = a, c, u, or g
  misc_feature 45..315: note = This region may encompass 1-271 nucleotides
  variation 45..317: note = a, c, u, or g
  variation 331: note = a, c, u, or g
  variation 336: note = a, c, u, or g
  variation 1..340: note = May or may not be present
  misc_feature 1..340: note = See specification as filed for detailed description of substitutions and preferred embodiments
  source 1..340: mol_type = other RNA
kdbnvydtggydbartmggknavvrynnwsrrytbtkrabhsdvnnnnnnnnnnnnnnnnnnnnnnnnnnnnnnnnnnnnnnnnnnnnnnnnnnnnnnnnnnnnnnnnnnnnnnnnnnnnnnnnnnnnnnnnnnnnnnnnnnnnnnnnnnnnnnnnnnnnnnnnnnnnnnnnnnnnnnnnnnnnnnnnnnnnnnnnnnnnnnnnnnnnnnnnnnnnnnnnnnnnnnnnnnnnnnnnnnnnnnnnnnnnnnnnnnnnnnnnnnnnnnnnnnnnnnnnnnnnnnnnnnnnnnnnnnnnnnnnnnnnnnnnnnnnnnnnndrrttyvadysyhnbhdbnvhmk

SEQ ID NO: 580 - RNA, 342 nt, synthetic construct
  misc_feature 1..342: note = Description of Sequence: Synthetic polynucleotide
  variation 1..2: note = a, c, u, or g
  variation 5..6: note = a, c, u, or g
  variation 9: note = a, c, u, or g
  variation 12: note = a, c, u, or g
  variation 16: note = a, c, u, or g
  variation 20..21: note = a, c, u, or g
  variation 26..27: note = a, c, u, or g
  variation 29..33: note = a, c, u, or g
  variation 41: note = a, c, u, or g
  variation 44..318: note = a, c, u, or g
  misc_feature 47..317: note = This region may encompass 1-271 nucleotides
  variation 320..321: note = a, c, u, or g
  variation 328: note = a, c, u, or g
  variation 333..336: note = a, c, u, or g
  variation 340..341: note = a, c, u, or g
  variation 1..342: note = May or may not be present
  misc_feature 1..342: note = See specification as filed for detailed description of substitutions and preferred embodiments
  source 1..342: mol_type = other RNA
nnbbnndtnrwnhrdnhygnnbhrdnnynnnnnvytytsrnbvnnnnnnnnnnnnnnnnnnnnnnnnnnnnnnnnnnnnnnnnnnnnnnnnnnnnnnnnnnnnnnnnnnnnnnnnnnnnnnnnnnnnnnnnnnnnnnnnnnnnnnnnnnnnnnnnnnnnnnnnnnnnnnnnnnnnnnnnnnnnnnnnnnnnnnnnnnnnnnnnnnnnnnnnnnnnnnnnnnnnnnnnnnnnnnnnnnnnnnnnnnnnnnnnnnnnnnnnnnnnnnnnnnnnnnnnnnnnnnnnnnnnnnnnnnnnnnnnnnnnnnnnnnnnnnnnnnnbnnrytbrwnyyhbnnnndvvnnd

SEQ ID NO: 581 - RNA, 340 nt, synthetic construct
  misc_feature 1..340: note = Description of Sequence: Synthetic polynucleotide
  variation 1..2: note = a, c, u, or g
  variation 5: note = a, c, u, or g
  variation 12: note = a, c, u, or g
  variation 20: note = a, c, u, or g
  variation 29: note = a, c, u, or g
  variation 31: note = a, c, u, or g
  variation 39: note = a, c, u, or g
  variation 43: note = a, c, u, or g
  misc_feature 45..315: note = This region may encompass 1-271 nucleotides
  variation 45..316: note = a, c, u, or g
  variation 319: note = a, c, u, or g
  variation 326: note = a, c, u, or g
  variation 334: note = a, c, u, or g
  variation 338: note = a, c, u, or g
  variation 1..340: note = May or may not be present
  misc_feature 1..340: note = See specification as filed for detailed description of substitutions and preferred embodiments
  source 1..340: mol_type = other RNA
nnbynbdyrgtntrdyagbnkrrvvywbnbnvytytsanbvhndnnnnnnnnnnnnnnnnnnnnnnnnnnnnnnnnnnnnnnnnnnnnnnnnnnnnnnnnnnnnnnnnnnnnnnnnnnnnnnnnnnnnnnnnnnnnnnnnnnnnnnnnnnnnnnnnnnnnnnnnnnnnnnnnnnnnnnnnnnnnnnnnnnnnnnnnnnnnnnnnnnnnnnnnnnnnnnnnnnnnnnnnnnnnnnnnnnnnnnnnnnnnnnnnnnnnnnnnnnnnnnnnnnnnnnnnnnnnnnnnnnnnnnnnnnnnnnnnnnnnnnnnnnnnnnnnydnrytbrwnychbrkbndvvnvd

SEQ ID NO: 582 - RNA, 339 nt, synthetic construct
  misc_feature 1..339: note = Description of Sequence: Synthetic polynucleotide
  variation 1: note = a, c, u, or g
  variation 28: note = a, c, u, or g
  variation 30: note = a, c, u, or g
  variation 42: note = a, c, u, or g
  variation 44..314: note = a, c, u, or g
  misc_feature 44..314: note = This region may encompass 1-271 nucleotides
  variation 318: note = a, c, u, or g
  variation 333: note = a, c, u, or g
  variation 1..339: note = May or may not be present
  misc_feature 1..339: note = See specification as filed for detailed description of substitutions and preferred embodiments
  source 1..339: mol_type = other RNA
ncsydbrtggtstakygshkrrsaywbnknsytytcahbvmndnnnnnnnnnnnnnnnnnnnnnnnnnnnnnnnnnnnnnnnnnnnnnnnnnnnnnnnnnnnnnnnnnnnnnnnnnnnnnnnnnnnnnnnnnnnnnnnnnnnnnnnnnnnnnnnnnnnnnnnnnnnnnnnnnnnnnnnnnnnnnnnnnnnnnnnnnnnnnnnnnnnnnnnnnnnnnnnnnnnnnnnnnnnnnnnnnnnnnnnnnnnnnnnnnnnnnnnnnnnnnnnnnnnnnnnnnnnnnnnnnnnnnnnnnnnnnnnnnnnnnnnnnnnnnnnbyrnrytyrwytcyyrgbnwrsraw

SEQ ID NO: 583 - RNA, 342 nt, synthetic construct
  misc_feature 1..342: note = Description of Sequence: Synthetic polynucleotide
  variation 4..7: note = a, c, u, or g
  variation 12: note = a, c, u, or g
  variation 16: note = a, c, u, or g
  variation 21..22: note = a, c, u, or g
  variation 26: note = a, c, u, or g
  variation 29..34: note = a, c, u, or g
  variation 41..319: note = a, c, u, or g
  misc_feature 47..317: note = This region may encompass 1-271 nucleotides
  variation 328: note = a, c, u, or g
  variation 333..338: note = a, c, u, or g
  variation 1..342: note = May or may not be present
  misc_feature 1..342: note = See specification as filed for detailed description of substitutions and preferred embodiments
  source 1..342: mol_type = other RNA
rbvnnnntvrynyrrnytbdnntadnrynnnnnnyybccvnnnnnnnnnnnnnnnnnnnnnnnnnnnnnnnnnnnnnnnnnnnnnnnnnnnnnnnnnnnnnnnnnnnnnnnnnnnnnnnnnnnnnnnnnnnnnnnnnnnnnnnnnnnnnnnnnnnnnnnnnnnnnnnnnnnnnnnnnnnnnnnnnnnnnnnnnnnnnnnnnnnnnnnnnnnnnnnnnnnnnnnnnnnnnnnnnnnnnnnnnnnnnnnnnnnnnnnnnnnnnnnnnnnnnnnnnnnnnnnnnnnnnnnnnnnnnnnnnnnnnnnnnnnnnnnnnnnnnnnvvstbbrwnhcbbnnnnnnbbyw

SEQ ID NO: 584 - RNA, 340 nt, synthetic construct
  misc_feature 1..340: note = Description of Sequence: Synthetic polynucleotide
  variation 5: note = a, c, u, or g
  variation 28: note = a, c, u, or g
  variation 39..40: note = a, c, u, or g
  variation 42: note = a, c, u, or g
  variation 45..315: note = a, c, u, or g
  misc_feature 45..315: note = This region may encompass 1-271 nucleotides
  variation 317: note = a, c, u, or g
  variation 335: note = a, c, u, or g
  variation 1..340: note = May or may not be present
  misc_feature 1..340: note = See specification as filed for detailed description of substitutions and preferred embodiments
  source 1..340: mol_type = other RNA
gbvbnsvtrrtdyrrdcggkdadmatdnhhrhytbccannynkdnnnnnnnnnnnnnnnnnnnnnnnnnnnnnnnnnnnnnnnnnnnnnnnnnnnnnnnnnnnnnnnnnnnnnnnnnnnnnnnnnnnnnnnnnnnnnnnnnnnnnnnnnnnnnnnnnnnnnnnnnnnnnnnnnnnnnnnnnnnnnnnnnnnnnnnnnnnnnnnnnnnnnnnnnnnnnnnnnnnnnnnnnnnnnnnnnnnnnnnnnnnnnnnnnnnnnnnnnnnnnnnnnnnnnnnnnnnnnnnnnnnnnnnnnnnnnnnnnnnnnnnnnnnnnnnbnrgsttbrwttccyksbsnvygca

SEQ ID NO: 585 - RNA, 340 nt, synthetic construct
  misc_feature 1..340: note = Description of Sequence: Synthetic polynucleotide
  variation 5: note = a, c, u, or g
  variation 28: note = a, c, u, or g
  variation 39: note = a, c, u, or g
  variation 42: note = a, c, u, or g
  variation 45..315: note = a, c, u, or g
  misc_feature 45..315: note = This region may encompass 1-271 nucleotides
  variation 335: note = a, c, u, or g
  variation 1..340: note = May or may not be present
  misc_feature 1..340: note = See specification as filed for detailed description of substitutions and preferred embodiments
  source 1..340: mol_type = other RNA
gyvynsvtrrtdyrrwcggkkadmatdnhhrhytbccandynkdnnnnnnnnnnnnnnnnnnnnnnnnnnnnnnnnnnnnnnnnnnnnnnnnnnnnnnnnnnnnnnnnnnnnnnnnnnnnnnnnnnnnnnnnnnnnnnnnnnnnnnnnnnnnnnnnnnnnnnnnnnnnnnnnnnnnnnnnnnnnnnnnnnnnnnnnnnnnnnnnnnnnnnnnnnnnnnnnnnnnnnnnnnnnnnnnnnnnnnnnnnnnnnnnnnnnnnnnnnnnnnnnnnnnnnnnnnnnnnnnnnnnnnnnnnnnnnnnnnnnnnnnnnnnnnnbvrgsttyrwttccyksbsnvygca

SEQ ID NO: 586 - RNA, 342 nt, synthetic construct
  misc_feature 1..342: note = Description of Sequence: Synthetic polynucleotide
  variation 4..7: note = a, c, u, or g
  variation 13: note = a, c, u, or g
  variation 25..26: note = a, c, u, or g
  variation 29..31: note = a, c, u, or g
  variation 34: note = a, c, u, or g
  variation 42: note = a, c, u, or g
  variation 45..317: note = a, c, u, or g
  misc_feature 47..317: note = This region may encompass 1-271 nucleotides
  variation 319..320: note = a, c, u, or g
  variation 328: note = a, c, u, or g
  variation 332..333: note = a, c, u, or g
  variation 336..338: note = a, c, u, or g
  variation 1..342: note = May or may not be present
  misc_feature 1..342: note = See specification as filed for detailed description of substitutions and preferred embodiments
  source 1..342: mol_type = other RNA
kgynnnndtvgbnhagbytgghyannvynnndbnytgtgrhnvhnnnnnnnnnnnnnnnnnnnnnnnnnnnnnnnnnnnnnnnnnnnnnnnnnnnnnnnnnnnnnnnnnnnnnnnnnnnnnnnnnnnnnnnnnnnnnnnnnnnnnnnnnnnnnnnnnnnnnnnnnnnnnnnnnnnnnnnnnnnnnnnnnnnnnnnnnnnnnnnnnnnnnnnnnnnnnnnnnnnnnnnnnnnnnnnnnnnnnnnnnnnnnnnnnnnnnnnnnnnnnnnnnnnnnnnnnnnnnnnnnnnnnnnnnnnnnnnnnnnnnnnnnnnnnnnnnvnnrgytcranycynnbhnnnvrym

SEQ ID NO: 587 - RNA, 339 nt, synthetic construct
  misc_feature 1..339: note = Description of Sequence: Synthetic polynucleotide
  variation 44..314: note = a, c, u, or g
  misc_feature 44..314: note = This region may encompass 1-271 nucleotides
  variation 1..339: note = May or may not be present
  misc_feature 1..339: note = See specification as filed for detailed description of substitutions and preferred embodiments
  source 1..339: mol_type = other RNA
gchrtgaybgtayagkggttasyactctgygytgtggccrcagnnnnnnnnnnnnnnnnnnnnnnnnnnnnnnnnnnnnnnnnnnnnnnnnnnnnnnnnnnnnnnnnnnnnnnnnnnnnnnnnnnnnnnnnnnnnnnnnnnnnnnnnnnnnnnnnnnnnnnnnnnnnnnnnnnnnnnnnnnnnnnnnnnnnnnnnnnnnnnnnnnnnnnnnnnnnnnnnnnnnnnnnnnnnnnnnnnnnnnnnnnnnnnnnnnnnnnnnnnnnnnnnnnnnnnnnnnnnnnnnnnnnnnnnnnnnnnnnnnnnnnnnnnnnnnncwyggytcraatcygagtcaygrca

SEQ ID NO: 588 - RNA, 339 nt, synthetic construct
  misc_feature 1..339: note = Description of Sequence: Synthetic polynucleotide
  variation 44..314: note = a, c, u, or g
  misc_feature 44..314: note = This region may encompass 1-271 nucleotides
  variation 1..339: note = May or may not be present
  misc_feature 1..339: note = See specification as filed for detailed description of substitutions and preferred embodiments
  source 1..339: mol_type = other RNA
gcmrtgayygtatagtggttagyactctgygytgtggccrcagnnnnnnnnnnnnnnnnnnnnnnnnnnnnnnnnnnnnnnnnnnnnnnnnnnnnnnnnnnnnnnnnnnnnnnnnnnnnnnnnnnnnnnnnnnnnnnnnnnnnnnnnnnnnnnnnnnnnnnnnnnnnnnnnnnnnnnnnnnnnnnnnnnnnnnnnnnnnnnnnnnnnnnnnnnnnnnnnnnnnnnnnnnnnnnnnnnnnnnnnnnnnnnnnnnnnnnnnnnnnnnnnnnnnnnnnnnnnnnnnnnnnnnnnnnnnnnnnnnnnnnnnnnnnnnncwyggttcraatcygagtcaygrca

SEQ ID NO: 589 - RNA, 342 nt, synthetic construct
  misc_feature 1..342: note = Description of Sequence: Synthetic polynucleotide
  variation 1: note = a, c, u, or g
  variation 4..5: note = a, c, u, or g
  variation 7: note = a, c, u, or g
  variation 17: note = a, c, u, or g
  variation 31..32: note = a, c, u, or g
  variation 34: note = a, c, u, or g
  variation 37: note = a, c, u, or g
  variation 42..320: note = a, c, u, or g
  misc_feature 47..317: note = This region may encompass 1-271 nucleotides
  variation 328..329: note = a, c, u, or g
  variation 332..334: note = a, c, u, or g
  variation 336..339: note = a, c, u, or g
  variation 1..342: note = May or may not be present
  misc_feature 1..342: note = See specification as filed for detailed description of substitutions and preferred embodiments
  source 1..342: mol_type = other RNA
nvsnnbndtrgybyrrnywggbhrdvrydbnnbnytnatrannnnnnnnnnnnnnnnnnnnnnnnnnnnnnnnnnnnnnnnnnnnnnnnnnnnnnnnnnnnnnnnnnnnnnnnnnnnnnnnnnnnnnnnnnnnnnnnnnnnnnnnnnnnnnnnnnnnnnnnnnnnnnnnnnnnnnnnnnnnnnnnnnnnnnnnnnnnnnnnnnnnnnnnnnnnnnnnnnnnnnnnnnnnnnnnnnnnnnnnnnnnnnnnnnnnnnnnnnnnnnnnnnnnnnnnnnnnnnnnnnnnnnnnnnnnnnnnnnnnnnnnnnnnnnnnnnnnnnndsywydannchnnnhnnnnsba

SEQ ID NO: 590 - RNA, 340 nt, synthetic construct
  misc_feature 1..340: note = Description of Sequence: Synthetic polynucleotide
  variation 45..315: note = a, c, u, or g
  misc_feature 45..315: note = This region may encompass 1-271 nucleotides
  variation 326..327: note = a, c, u, or g
  variation 335: note = a, c, u, or g
  variation 1..340: note = May or may not be present
  misc_feature 1..340: note = See specification as filed for detailed description of substitutions and preferred embodiments
  source 1..340: mol_type = other RNA
gsyybrktrgykyrrtyggyhagmgcrygktrctdataayryyrnnnnnnnnnnnnnnnnnnnnnnnnnnnnnnnnnnnnnnnnnnnnnnnnnnnnnnnnnnnnnnnnnnnnnnnnnnnnnnnnnnnnnnnnnnnnnnnnnnnnnnnnnnnnnnnnnnnnnnnnnnnnnnnnnnnnnnnnnnnnnnnnnnnnnnnnnnnnnnnnnnnnnnnnnnnnnnnnnnnnnnnnnnnnnnnnnnnnnnnnnnnnnnnnnnnnnnnnnnnnnnnnnnnnnnnnnnnnnnnnnnnnnnnnnnnnnnnnnnnnnnnnnnnnnnnryrrsywydanncycrymyngrsca

SEQ ID NO: 591 - RNA, 340 nt, synthetic construct
  misc_feature 1..340: note = Description of Sequence: Synthetic polynucleotide
  variation 45..315: note = a, c, u, or g
  misc_feature 45..315: note = This region may encompass 1-271 nucleotides
  variation 1..340: note = May or may not be present
  misc_feature 1..340: note = See specification as filed for detailed description of substitutions and preferred embodiments
  source 1..340: mol_type = other RNA
gsyysrktrgykcartyggyhagmgcgyggtrctdataayrcyrnnnnnnnnnnnnnnnnnnnnnnnnnnnnnnnnnnnnnnnnnnnnnnnnnnnnnnnnnnnnnnnnnnnnnnnnnnnnnnnnnnnnnnnnnnnnnnnnnnnnnnnnnnnnnnnnnnnnnnnnnnnnnnnnnnnnnnnnnnnnnnnnnnnnnnnnnnnnnnnnnnnnnnnnnnnnnnnnnnnnnnnnnnnnnnnnnnnnnnnnnnnnnnnnnnnnnnnnnnnnnnnnnnnnnnnnnnnnnnnnnnnnnnnnnnnnnnnnnnnnnnnnnnnnnnngygrgytcrabhcycrymybgrsca

SEQ ID NO: 592 - RNA, 341 nt, synthetic construct
  misc_feature 1..341: note = Description of Sequence: Synthetic polynucleotide
  variation 1: note = a, c, u, or g
  variation 3..6: note = a, c, u, or g
  variation 11..12: note = a, c, u, or g
  variation 16..17: note = a, c, u, or g
  variation 21..22: note = a, c, u, or g
  variation 25..26: note = a, c, u, or g
  variation 28..31: note = a, c, u, or g
  variation 41: note = a, c, u, or g
  variation 43..316: note = a, c, u, or g
  misc_feature 46..316: note = This region may encompass 1-271 nucleotides
  variation 318..319: note = a, c, u, or g
  variation 327: note = a, c, u, or g
  variation 331..332: note = a, c, u, or g
  variation 335..338: note = a, c, u, or g
  variation 340: note = a, c, u, or g
  variation 1..341: note = May or may not be present
  misc_feature 1..341: note = See specification as filed for detailed description of substitutions and preferred embodiments
  source 1..341: mol_type = other RNA
nbnnnndtrsnnbarnnhggnnddnnbnnnnvdhycatahnbnnnnnnnnnnnnnnnnnnnnnnnnnnnnnnnnnnnnnnnnnnnnnnnnnnnnnnnnnnnnnnnnnnnnnnnnnnnnnnnnnnnnnnnnnnnnnnnnnnnnnnnnnnnnnnnnnnnnnnnnnnnnnnnnnnnnnnnnnnnnnnnnnnnnnnnnnnnnnnnnnnnnnnnnnnnnnnnnnnnnnnnnnnnnnnnnnnnnnnnnnnnnnnnnnnnnnnnnnnnnnnnnnnnnnnnnnnnnnnnnnnnnnnnnnnnnnnnnnnnnnnnnnnnnnnnnnnvnnrgdtsdanhmynnbhnnnnvnw

SEQ ID NO: 593 - RNA, 339 nt, synthetic construct
  misc_feature 1..339: note = Description of Sequence: Synthetic polynucleotide
  variation 4: note = a, c, u, or g
  variation 44..314: note = a, c, u, or g
  misc_feature 44..314: note = This region may encompass 1-271 nucleotides
  variation 1..339: note = May or may not be present
  misc_feature 1..339: note = See specification as filed for detailed description of substitutions and preferred embodiments
  source 1..339: mol_type = other RNA
rbcnbvktrgygcagydgghagyryryyrgkyycataahyyvrnnnnnnnnnnnnnnnnnnnnnnnnnnnnnnnnnnnnnnnnnnnnnnnnnnnnnnnnnnnnnnnnnnnnnnnnnnnnnnnnnnnnnnnnnnnnnnnnnnnnnnnnnnnnnnnnnnnnnnnnnnnnnnnnnnnnnnnnnnnnnnnnnnnnnnnnnnnnnnnnnnnnnnnnnnnnnnnnnnnnnnnnnnnnnnnnnnnnnnnnnnnnnnnnnnnnnnnnnnnnnnnnnnnnnnnnnnnnnnnnnnnnnnnnnnnnnnnnnnnnnnnnnnnnnnnsdkrgdtsdadmmymwsmbvbgsya

SEQ ID NO: 594 - RNA, 339 nt, synthetic construct
  misc_feature 1..339: note = Description of Sequence: Synthetic polynucleotide
  variation 44..314: note = a, c, u, or g
  misc_feature 44..314: note = This region may encompass 1-271 nucleotides
  variation 1..339: note = May or may not be present
  misc_feature 1..339: note = See specification as filed for detailed description of substitutions and preferred embodiments
  source 1..339: mol_type = other RNA
rschbvktrgygcagydgghagcryryyrgkyycataaycyrrnnnnnnnnnnnnnnnnnnnnnnnnnnnnnnnnnnnnnnnnnnnnnnnnnnnnnnnnnnnnnnnnnnnnnnnnnnnnnnnnnnnnnnnnnnnnnnnnnnnnnnnnnnnnnnnnnnnnnnnnnnnnnnnnnnnnnnnnnnnnnnnnnnnnnnnnnnnnnnnnnnnnnnnnnnnnnnnnnnnnnnnnnnnnnnnnnnnnnnnnnnnnnnnnnnnnnnnnnnnnnnnnnnnnnnnnnnnnnnnnnnnnnnnnnnnnnnnnnnnnnnnnnnnnnnnswkrgwtsdadmcymwsmbvkgsya

SEQ ID NO: 595 - RNA, 342 nt, synthetic construct
  misc_feature 1..342: note = Description of Sequence: Synthetic polynucleotide
  variation 2..7: note = a, c, u, or g
  variation 9..12: note = a, c, u, or g
  variation 16: note = a, c, u, or g
  variation 23: note = a, c, u, or g
  variation 26: note = a, c, u, or g
  variation 28..34: note = a, c, u, or g
  variation 37: note = a, c, u, or g
  variation 41..317: note = a, c, u, or g
  misc_feature 47..317: note = This region may encompass 1-271 nucleotides
  variation 319..320: note = a, c, u, or g
  variation 328: note = a, c, u, or g
  variation 332..333: note = a, c, u, or g
  variation 335..340: note = a, c, u, or g
  variation 1..342: note = May or may not be present
  misc_feature 1..342: note = See specification as filed for detailed description of substitutions and preferred embodiments
  source 1..342: mol_type = other RNA
vnnnnnntnnnnvrrnhhgkhhndhnvnnnnnnnhynardnnnnnnnnnnnnnnnnnnnnnnnnnnnnnnnnnnnnnnnnnnnnnnnnnnnnnnnnnnnnnnnnnnnnnnnnnnnnnnnnnnnnnnnnnnnnnnnnnnnnnnnnnnnnnnnnnnnnnnnnnnnnnnnnnnnnnnnnnnnnnnnnnnnnnnnnnnnnnnnnnnnnnnnnnnnnnnnnnnnnnnnnnnnnnnnnnnnnnnnnnnnnnnnnnnnnnnnnnnnnnnnnnnnnnnnnnnnnnnnnnnnnnnnnnnnnnnnnnnnnnnnnnnnnnnnnnnnnnvnnvbythvanymbnnbnnnnnnbr

SEQ ID NO: 596 - RNA, 342 nt, synthetic construct
  misc_feature 1..342: note = Description of Sequence: Synthetic polynucleotide
  variation 6: note = a, c, u, or g
  variation 33: note = a, c, u, or g
  variation 41: note = a, c, u, or g
  variation 43: note = a, c, u, or g
  variation 46..317: note = a, c, u, or g
  misc_feature 47..317: note = This region may encompass 1-271 nucleotides
  variation 319: note = a, c, u, or g
  variation 328: note = a, c, u, or g
  variation 333: note = a, c, u, or g
  variation 336: note = a, c, u, or g
  variation 340: note = a, c, u, or g
  variation 1..342: note = May or may not be present
  misc_feature 1..342: note = See specification as filed for detailed description of substitutions and preferred embodiments
  source 1..342: mol_type = other RNA
rbbvvndtrkhhsrrbhygkhhtrwbrhdbhdnrythardnynhdnnnnnnnnnnnnnnnnnnnnnnnnnnnnnnnnnnnnnnnnnnnnnnnnnnnnnnnnnnnnnnnnnnnnnnnnnnnnnnnnnnnnnnnnnnnnnnnnnnnnnnnnnnnnnnnnnnnnnnnnnnnnnnnnnnnnnnnnnnnnnnnnnnnnnnnnnnnnnnnnnnnnnnnnnnnnnnnnnnnnnnnnnnnnnnnnnnnnnnnnnnnnnnnnnnnnnnnnnnnnnnnnnnnnnnnnnnnnnnnnnnnnnnnnnnnnnnnnnnnnnnnnnnnnnnnnvnvgbythvanymybnbbnbbvnya

SEQ ID NO: 597 - RNA, 342 nt, synthetic construct
  misc_feature 1..342: note = Description of Sequence: Synthetic polynucleotide
  variation 6: note = a, c, u, or g
  variation 33: note = a, c, u, or g
  variation 43: note = a, c, u, or g
  variation 46..317: note = a, c, u, or g
  misc_feature 47..317: note = This region may encompass 1-271 nucleotides
  variation 319: note = a, c, u, or g
  variation 333: note = a, c, u, or g
  variation 336: note = a, c, u, or g
  variation 340: note = a, c, u, or g
  variation 1..342: note = May or may not be present
  misc_feature 1..342: note = See specification as filed for detailed description of substitutions and preferred embodiments
  source 1..342: mol_type = other RNA
rbbvvndtrkhhsrrbhygkhhtrwkrhdbhdnrythardhynhdnnnnnnnnnnnnnnnnnnnnnnnnnnnnnnnnnnnnnnnnnnnnnnnnnnnnnnnnnnnnnnnnnnnnnnnnnnnnnnnnnnnnnnnnnnnnnnnnnnnnnnnnnnnnnnnnnnnnnnnnnnnnnnnnnnnnnnnnnnnnnnnnnnnnnnnnnnnnnnnnnnnnnnnnnnnnnnnnnnnnnnnnnnnnnnnnnnnnnnnnnnnnnnnnnnnnnnnnnnnnnnnnnnnnnnnnnnnnnnnnnnnnnnnnnnnnnnnnnnnnnnnnnnnnnnnnvnvgbythvavymybnbynbbvnya

SEQ ID NO: 598 - RNA, 342 nt, synthetic construct
  misc_feature 1..342: note = Description of Sequence: Synthetic polynucleotide
  variation 1..7: note = a, c, u, or g
  variation 11..12: note = a, c, u, or g
  variation 16: note = a, c, u, or g
  variation 21: note = a, c, u, or g
  variation 26: note = a, c, u, or g
  variation 30..32: note = a, c, u, or g
  variation 44..320: note = a, c, u, or g
  misc_feature 47..317: note = This region may encompass 1-271 nucleotides
  variation 328: note = a, c, u, or g
  variation 332..333: note = a, c, u, or g
  variation 335..340: note = a, c, u, or g
  variation 1..342: note = May or may not be present
  misc_feature 1..342: note = See specification as filed for detailed description of substitutions and preferred embodiments
  source 1..342: mol_type = other RNA
nnnnnnntrsnnharnhwrrnttdrnrydnnnsvyyyttmmbvnnnnnnnnnnnnnnnnnnnnnnnnnnnnnnnnnnnnnnnnnnnnnnnnnnnnnnnnnnnnnnnnnnnnnnnnnnnnnnnnnnnnnnnnnnnnnnnnnnnnnnnnnnnnnnnnnnnnnnnnnnnnnnnnnnnnnnnnnnnnnnnnnnnnnnnnnnnnnnnnnnnnnnnnnnnnnnnnnnnnnnnnnnnnnnnnnnnnnnnnnnnnnnnnnnnnnnnnnnnnnnnnnnnnnnnnnnnnnnnnnnnnnnnnnnnnnnnnnnnnnnnnnnnnnnnnnnnnnvrytyrwnhybnnbnnnnnnhd

SEQ ID NO: 599 - RNA, 340 nt, synthetic construct
  misc_feature 1..340: note = Description of Sequence: Synthetic polynucleotide
  variation 1: note = a, c, u, or g
  variation 6: note = a, c, u, or g
  variation 11: note = a, c, u, or g
  variation 29: note = a, c, u, or g
  variation 43: note = a, c, u, or g
  misc_feature 45..315: note = This region may encompass 1-271 nucleotides
  variation 45..317: note = a, c, u, or g
  variation 331: note = a, c, u, or g
  variation 333..334: note = a, c, u, or g
  variation 336: note = a, c, u, or g
  variation 1..340: note = May or may not be present
  misc_feature 1..340: note = See specification as filed for detailed description of substitutions and preferred embodiments
  source 1..340: mol_type = other RNA
nhvbdnvkrsnhharbhrrbtdrdrydbndgryyyttmmymhndnnnnnnnnnnnnnnnnnnnnnnnnnnnnnnnnnnnnnnnnnnnnnnnnnnnnnnnnnnnnnnnnnnnnnnnnnnnnnnnnnnnnnnnnnnnnnnnnnnnnnnnnnnnnnnnnnnnnnnnnnnnnnnnnnnnnnnnnnnnnnnnnnnnnnnnnnnnnnnnnnnnnnnnnnnnnnnnnnnnnnnnnnnnnnnnnnnnnnnnnnnnnnnnnnnnnnnnnnnnnnnnnnnnnnnnnnnnnnnnnnnnnnnnnnnnnnnnnnnnnnnnnnnnnnnnnnrgrytyrwbyysynbnnhndrhr

SEQ ID NO: 600 - RNA, 340 nt, synthetic construct
  misc_feature 1..340: note = Description of Sequence: Synthetic polynucleotide
  misc_feature 45..315: note = This region may encompass 1-271 nucleotides
  variation 45..316: note = a, c, u, or g
  variation 333: note = a, c, u, or g
  variation 336: note = a, c, u, or g
  variation 1..340: note = May or may not be present
  misc_feature 1..340: note = See specification as filed for detailed description of substitutions and preferred embodiments
  source 1..340: mol_type = other RNA
vhvbrdvkascwharthrrbtdrwrcrkvdgactyttmatchswnnnnnnnnnnnnnnnnnnnnnnnnnnnnnnnnnnnnnnnnnnnnnnnnnnnnnnnnnnnnnnnnnnnnnnnnnnnnnnnnnnnnnnnnnnnnnnnnnnnnnnnnnnnnnnnnnnnnnnnnnnnnnnnnnnnnnnnnnnnnnnnnnnnnnnnnnnnnnnnnnnnnnnnnnnnnnnnnnnnnnnnnnnnnnnnnnnnnnnnnnnnnnnnnnnnnnnnnnnnnnnnnnnnnnnnnnnnnnnnnnnnnnnnnnnnnnnnnnnnnnnnnnnnnnnnndrgrytyrwkyysyhbnhynkryr

SEQ ID NO: 601 - RNA, 341 nt, synthetic construct
  misc_feature 1..341: note = Description of Sequence: Synthetic polynucleotide
  variation 4..6: note = a, c, u, or g
  variation 29..31: note = a, c, u, or g
  variation 33: note = a, c, u, or g
  variation 41: note = a, c, u, or g
  variation 43..318: note = a, c, u, or g
  misc_feature 46..316: note = This region may encompass 1-271 nucleotides
  variation 327: note = a, c, u, or g
  variation 331..332: note = a, c, u, or g
  variation 335..338: note = a, c, u, or g
  variation 1..341: note = May or may not be present
  misc_feature 1..341: note = See specification as filed for detailed description of substitutions and preferred embodiments
  source 1..341: mol_type = other RNA
kbbnnndtagyyyarhytggbwwgrryrnnnbnyygaarvnbnnnnnnnnnnnnnnnnnnnnnnnnnnnnnnnnnnnnnnnnnnnnnnnnnnnnnnnnnnnnnnnnnnnnnnnnnnnnnnnnnnnnnnnnnnnnnnnnnnnnnnnnnnnnnnnnnnnnnnnnnnnnnnnnnnnnnnnnnnnnnnnnnnnnnnnnnnnnnnnnnnnnnnnnnnnnnnnnnnnnnnnnnnnnnnnnnnnnnnnnnnnnnnnnnnnnnnnnnnnnnnnnnnnnnnnnnnnnnnnnnnnnnnnnnnnnnnnnnnnnnnnnnnnnnnnnnnnnbdgttcranychnnbhnnnnvma

SEQ ID NO: 602 - RNA, 340 nt, synthetic construct
  misc_feature 1..340: note = Description of Sequence: Synthetic polynucleotide
  variation 45..315: note = a, c, u, or g
  misc_feature 45..315: note = This region may encompass 1-271 nucleotides
  variation 1..340: note = May or may not be present
  misc_feature 1..340: note = See specification as filed for detailed description of substitutions and preferred embodiments
  source 1..340: mol_type = other RNA
kbyvwrrtwgyyyarttggstagrrydykrbrcygaarrysyhmnnnnnnnnnnnnnnnnnnnnnnnnnnnnnnnnnnnnnnnnnnnnnnnnnnnnnnnnnnnnnnnnnnnnnnnnnnnnnnnnnnnnnnnnnnnnnnnnnnnnnnnnnnnnnnnnnnnnnnnnnnnnnnnnnnnnnnnnnnnnnnnnnnnnnnnnnnnnnnnnnnnnnnnnnnnnnnnnnnnnnnnnnnnnnnnnnnnnnnnnnnnnnnnnnnnnnnnnnnnnnnnnnnnnnnnnnnnnnnnnnnnnnnnnnnnnnnnnnnnnnnnnnnnnnnnyckggttcrayycysggtywbrvma

SEQ ID NO: 603 - RNA, 339 nt, synthetic construct
  misc_feature 1..339: note = Description of Sequence: Synthetic polynucleotide
  variation 44..314: note = a, c, u, or g
  misc_feature 44..314: note = This region may encompass 1-271 nucleotides
  variation 1..339: note = May or may not be present
  misc_feature 1..339: note = See specification as filed for detailed description of substitutions and preferred embodiments
  source 1..339: mol_type = other RNA
gcyraratwgctcarttgggagagygttasacygaagatctwmnnnnnnnnnnnnnnnnnnnnnnnnnnnnnnnnnnnnnnnnnnnnnnnnnnnnnnnnnnnnnnnnnnnnnnnnnnnnnnnnnnnnnnnnnnnnnnnnnnnnnnnnnnnnnnnnnnnnnnnnnnnnnnnnnnnnnnnnnnnnnnnnnnnnnnnnnnnnnnnnnnnnnnnnnnnnnnnnnnnnnnnnnnnnnnnnnnnnnnnnnnnnnnnnnnnnnnnnnnnnnnnnnnnnnnnnnnnnnnnnnnnnnnnnnnnnnnnnnnnnnnnnnnnnnnnyctggttcrayycygggtttcrvca

SEQ ID NO: 604 - RNA, 342 nt, synthetic construct
  misc_feature 1..342: note = Description of Sequence: Synthetic polynucleotide
  variation 4..6: note = a, c, u, or g
  variation 16: note = a, c, u, or g
  variation 21: note = a, c, u, or g
  variation 29..34: note = a, c, u, or g
  variation 37: note = a, c, u, or g
  variation 41..320: note = a, c, u, or g
  misc_feature 47..317: note = This region may encompass 1-271 nucleotides
  variation 328: note = a, c, u, or g
  variation 331..334: note = a, c, u, or g
  variation 336..338: note = a, c, u, or g
  variation 1..342: note = May or may not be present
  misc_feature 1..342: note = See specification as filed for detailed description of substitutions and preferred embodiments
  source 1..342: mol_type = other RNA
sksnnndtvgbbyagnyygbnyyrdvvynnnnnnhtnggrnnnnnnnnnnnnnnnnnnnnnnnnnnnnnnnnnnnnnnnnnnnnnnnnnnnnnnnnnnnnnnnnnnnnnnnnnnnnnnnnnnnnnnnnnnnnnnnnnnnnnnnnnnnnnnnnnnnnnnnnnnnnnnnnnnnnnnnnnnnnnnnnnnnnnnnnnnnnnnnnnnnnnnnnnnnnnnnnnnnnnnnnnnnnnnnnnnnnnnnnnnnnnnnnnnnnnnnnnnnnnnnnnnnnnnnnnnnnnnnnnnnnnnnnnnnnnnnnnnnnnnnnnnnnnnnnnnnnnnnndgttcranycnnnnhnnnbmsm

SEQ ID NO: 605 - RNA, 338 nt, synthetic construct
  misc_feature 1..338: note = Description of Sequence: Synthetic polynucleotide
  variation 39: note = a, c, u, or g
  variation 43..313: note = a, c, u, or g
  misc_feature 43..313: note = This region may encompass 1-271 nucleotides
  variation 1..338: note = May or may not be present
  misc_feature 1..338: note = See specification as filed for detailed description of substitutions and preferred embodiments
  source 1..338: mol_type = other RNA
ggctsgttggkctagkgbtrtgrttctcrsythggrysnragnnnnnnnnnnnnnnnnnnnnnnnnnnnnnnnnnnnnnnnnnnnnnnnnnnnnnnnnnnnnnnnnnnnnnnnnnnnnnnnnnnnnnnnnnnnnnnnnnnnnnnnnnnnnnnnnnnnnnnnnnnnnnnnnnnnnnnnnnnnnnnnnnnnnnnnnnnnnnnnnnnnnnnnnnnnnnnnnnnnnnnnnnnnnnnnnnnnnnnnnnnnnnnnnnnnnnnnnnnnnnnnnnnnnnnnnnnnnnnnnnnnnnnnnnnnnnnnnnnnnnnnnnnnnnnncygggttcaaatcvyrgasgagccc

SEQ ID NO: 606 - RNA, 338 nt, synthetic construct
  misc_feature 1..338: note = Description of Sequence: Synthetic polynucleotide
  variation 43..313: note = a, c, u, or g
  misc_feature 43..313: note = This region may encompass 1-271 nucleotides
  variation 1..338: note = May or may not be present
  misc_feature 1..338: note = See specification as filed for detailed description of substitutions and preferred embodiments
  source 1..338: mol_type = other RNA
ggctcgttggtctagkggtrtgrttctcgstthggrysbgagnnnnnnnnnnnnnnnnnnnnnnnnnnnnnnnnnnnnnnnnnnnnnnnnnnnnnnnnnnnnnnnnnnnnnnnnnnnnnnnnnnnnnnnnnnnnnnnnnnnnnnnnnnnnnnnnnnnnnnnnnnnnnnnnnnnnnnnnnnnnnnnnnnnnnnnnnnnnnnnnnnnnnnnnnnnnnnnnnnnnnnnnnnnnnnnnnnnnnnnnnnnnnnnnnnnnnnnnnnnnnnnnnnnnnnnnnnnnnnnnnnnnnnnnnnnnnnnnnnnnnnnnnnnnnnnccgggttcaaatcccggacgagccc

SEQ ID NO: 607 - RNA, 342 nt, synthetic construct
  misc_feature 1..342: note = Description of Sequence: Synthetic polynucleotide
  variation 2..7: note = a, c, u, or g
  variation 9..13: note = a, c, u, or g
  variation 16: note = a, c, u, or g
  variation 21: note = a, c, u, or g
  variation 25..28: note = a, c, u, or g
  variation 30..34: note = a, c, u, or g
  variation 37: note = a, c, u, or g
  variation 42..320: note = a, c, u, or g
  misc_feature 47..317: note = This region may encompass 1-271 nucleotides
  variation 332..340: note = a, c, u, or g
  variation 1..342: note = May or may not be present
  misc_feature 1..342: note = See specification as filed for detailed description of substitutions and preferred embodiments
  source 1..342: mol_type = other RNA
dnnnnnnynnnnnarnbhggnbbannnndnnnnnyynswrmnnnnnnnnnnnnnnnnnnnnnnnnnnnnnnnnnnnnnnnnnnnnnnnnnnnnnnnnnnnnnnnnnnnnnnnnnnnnnnnnnnnnnnnnnnnnnnnnnnnnnnnnnnnnnnnnnnnnnnnnnnnnnnnnnnnnnnnnnnnnnnnnnnnnnnnnnnnnnnnnnnnnnnnnnnnnnnnnnnnnnnnnnnnnnnnnnnnnnnnnnnnnnnnnnnnnnnnnnnnnnnnnnnnnnnnnnnnnnnnnnnnnnnnnnnnnnnnnnnnnnnnnnnnnnnnnnnnnnnnrkttyradycynnnnnnnnnbd

SEQ ID NO: 608 - RNA, 341 nt, synthetic construct
  misc_feature 1..341: note = Description of Sequence: Synthetic polynucleotide
  variation 2..5: note = a, c, u, or g
  variation 36: note = a, c, u, or g
  variation 46..316: note = a, c, u, or g
  misc_feature 46..316: note = This region may encompass 1-271 nucleotides
  variation 319: note = a, c, u, or g
  variation 331: note = a, c, u, or g
  variation 335..336: note = a, c, u, or g
  variation 338..339: note = a, c, u, or g
  variation 1..341: note = May or may not be present
  misc_feature 1..341: note = See specification as filed for detailed description of substitutions and preferred embodiments
  source 1..341: mol_type = other RNA
knnnnbdtrgchsarkbtggttavdghrdbkdrcynswraybmvdnnnnnnnnnnnnnnnnnnnnnnnnnnnnnnnnnnnnnnnnnnnnnnnnnnnnnnnnnnnnnnnnnnnnnnnnnnnnnnnnnnnnnnnnnnnnnnnnnnnnnnnnnnnnnnnnnnnnnnnnnnnnnnnnnnnnnnnnnnnnnnnnnnnnnnnnnnnnnnnnnnnnnnnnnnnnnnnnnnnnnnnnnnnnnnnnnnnnnnnnnnnnnnnnnnnnnnnnnnnnnnnnnnnnnnnnnnnnnnnnnnnnnnnnnnnnnnnnnnnnnnnnnnnnnnnvyngkttyradyccnrbhnnbnnyd

SEQ ID NO: 609 - RNA, 341 nt, synthetic construct
  misc_feature 1..341: note = Description of Sequence: Synthetic polynucleotide
  variation 2..3: note = a, c, u, or g
  variation 5: note = a, c, u, or g
  variation 36: note = a, c, u, or g
  variation 46..316: note = a, c, u, or g
  misc_feature 46..316: note = This region may encompass 1-271 nucleotides
  variation 335..336: note = a, c, u, or g
  variation 338..339: note = a, c, u, or g
  variation 1..341: note = May or may not be present
  misc_feature 1..341: note = See specification as filed for detailed description of substitutions and preferred embodiments
  source 1..341: mol_type = other RNA
knndnbrtrgchsarkctggttavdghrwykrrctnswrayymrdnnnnnnnnnnnnnnnnnnnnnnnnnnnnnnnnnnnnnnnnnnnnnnnnnnnnnnnnnnnnnnnnnnnnnnnnnnnnnnnnnnnnnnnnnnnnnnnnnnnnnnnnnnnnnnnnnnnnnnnnnnnnnnnnnnnnnnnnnnnnnnnnnnnnnnnnnnnnnnnnnnnnnnnnnnnnnnnnnnnnnnnnnnnnnnnnnnnnnnnnnnnnnnnnnnnnnnnnnnnnnnnnnnnnnnnnnnnnnnnnnnnnnnnnnnnnnnnnnnnnnnnnnnnnnnnvydggttyraaycchrbynnynnyk

SEQ ID NO: 610 - RNA, 341 nt, synthetic construct
  misc_feature 1..341: note = Description of Sequence: Synthetic polynucleotide
  variation 4..7: note = a, c, u, or g
  variation 12: note = a, c, u, or g
  variation 16: note = a, c, u, or g
  variation 25: note = a, c, u, or g
  variation 29..31: note = a, c, u, or g
  variation 33: note = a, c, u, or g
  variation 36: note = a, c, u, or g
  variation 41: note = a, c, u, or g
  variation 43..319: note = a, c, u, or g
  misc_feature 46..316: note = This region may encompass 1-271 nucleotides
  variation 327: note = a, c, u, or g
  variation 331..337: note = a, c, u, or g
  variation 341: note = a, c, u, or g
  variation 1..341: note = May or may not be present
  misc_feature 1..341: note = See specification as filed for detailed description of substitutions and preferred embodiments
  source 1..341: mol_type = other RNA
rbbnnnntrgynhadnhykghyrdnryrnnnsnhyngtwansnnnnnnnnnnnnnnnnnnnnnnnnnnnnnnnnnnnnnnnnnnnnnnnnnnnnnnnnnnnnnnnnnnnnnnnnnnnnnnnnnnnnnnnnnnnnnnnnnnnnnnnnnnnnnnnnnnnnnnnnnnnnnnnnnnnnnnnnnnnnnnnnnnnnnnnnnnnnnnnnnnnnnnnnnnnnnnnnnnnnnnnnnnnnnnnnnnnnnnnnnnnnnnnnnnnnnnnnnnnnnnnnnnnnnnnnnnnnnnnnnnnnnnnnnnnnnnnnnnnnnnnnnnnnnnnnnnnnndgwyyvanbyhnnnnnnnrvyn

SEQ ID NO: 611 - RNA, 340 nt, synthetic construct
  misc_feature 1..340: note = Description of Sequence: Synthetic polynucleotide
  variation 4: note = a, c, u, or g
  variation 6: note = a, c, u, or g
  variation 12: note = a, c, u, or g
  variation 24: note = a, c, u, or g
  variation 45..315: note = a, c, u, or g
  misc_feature 45..315: note = This region may encompass 1-271 nucleotides
  variation 317: note = a, c, u, or g
  variation 326: note = a, c, u, or g
  variation 331..332: note = a, c, u, or g
  variation 334: note = a, c, u, or g
  variation 336: note = a, c, u, or g
  variation 1..340: note = May or may not be present
  misc_feature 1..340: note = See specification as filed for detailed description of substitutions and preferred embodiments
  source 1..340: mol_type = other RNA
rbbnbndtvgynharbygghyrdnryryhbsbcyhgtwavsvdrnnnnnnnnnnnnnnnnnnnnnnnnnnnnnnnnnnnnnnnnnnnnnnnnnnnnnnnnnnnnnnnnnnnnnnnnnnnnnnnnnnnnnnnnnnnnnnnnnnnnnnnnnnnnnnnnnnnnnnnnnnnnnnnnnnnnnnnnnnnnnnnnnnnnnnnnnnnnnnnnnnnnnnnnnnnnnnnnnnnnnnnnnnnnnnnnnnnnnnnnnnnnnnnnnnnnnnnnnnnnnnnnnnnnnnnnnnnnnnnnnnnnnnnnnnnnnnnnnnnnnnnnnnnnnnnvndrgwtyvanbyyhnnbndnrvyb

SEQ ID NO: 612 - RNA, 340 nt, synthetic construct
  misc_feature 1..340: note = Description of Sequence: Synthetic polynucleotide
  variation 4: note = a, c, u, or g
  variation 6: note = a, c, u, or g
  variation 12: note = a, c, u, or g
  variation 24: note = a, c, u, or g
  variation 45..315: note = a, c, u, or g
  misc_feature 45..315: note = This region may encompass 1-271 nucleotides
  variation 326: note = a, c, u, or g
  variation 332: note = a, c, u, or g
  variation 334: note = a, c, u, or g
  variation 336: note = a, c, u, or g
  variation 1..340: note = May or may not be present
  misc_feature 1..340: note = See specification as filed for detailed description of substitutions and preferred embodiments
  source 1..340: mol_type = other RNA
rsynbndtvgynharbtgghyrdnryryhksbcyhgtaavsmdrnnnnnnnnnnnnnnnnnnnnnnnnnnnnnnnnnnnnnnnnnnnnnnnnnnnnnnnnnnnnnnnnnnnnnnnnnnnnnnnnnnnnnnnnnnnnnnnnnnnnnnnnnnnnnnnnnnnnnnnnnnnnnnnnnnnnnnnnnnnnnnnnnnnnnnnnnnnnnnnnnnnnnnnnnnnnnnnnnnnnnnnnnnnnnnnnnnnnnnnnnnnnnnnnnnnnnnnnnnnnnnnnnnnnnnnnnnnnnnnnnnnnnnnnnnnnnnnnnnnnnnnnnnnnnnnvhdrgwtyvanbyyhdnbndnrsyt

SEQ ID NO: 613 - RNA, 342 nt, synthetic construct
  misc_feature 1..342: note = Description of Sequence: Synthetic polynucleotide
  variation 4..6: note = a, c, u, or g
  variation 29..32: note = a, c, u, or g
  variation 34: note = a, c, u, or g
  variation 42: note = a, c, u, or g
  variation 44..317: note = a, c, u, or g
  misc_feature 47..317: note = This region may encompass 1-271 nucleotides
  variation 319: note = a, c, u, or g
  variation 321: note = a, c, u, or g
  variation 328: note = a, c, u, or g
  variation 333: note = a, c, u, or g
  variation 336..338: note = a, c, u, or g
  variation 1..342: note = May or may not be present
  misc_feature 1..342: note = See specification as filed for detailed description of substitutions and preferred embodiments
  source 1..342: mol_type = other RNA
rvvnnndtrrybhhrhyhgghytadvvynnnnrnbtccavanbnnnnnnnnnnnnnnnnnnnnnnnnnnnnnnnnnnnnnnnnnnnnnnnnnnnnnnnnnnnnnnnnnnnnnnnnnnnnnnnnnnnnnnnnnnnnnnnnnnnnnnnnnnnnnnnnnnnnnnnnnnnnnnnnnnnnnnnnnnnnnnnnnnnnnnnnnnnnnnnnnnnnnnnnnnnnnnnnnnnnnnnnnnnnnnnnnnnnnnnnnnnnnnnnnnnnnnnnnnnnnnnnnnnnnnnnnnnnnnnnnnnnnnnnnnnnnnnnnnnnnnnnnnnnnnnnnnvnrngttcranychynbhnnnbbhd

SEQ ID NO: 614 - RNA, 339 nt, synthetic construct
  misc_feature 1..339: note = Description of Sequence: Synthetic polynucleotide
  variation 44..314: note = a, c, u, or g
  misc_feature 44..314: note = This region may encompass 1-271 nucleotides
  variation 1..339: note = May or may not be present
  misc_feature 1..339: note = See specification as filed for detailed description of substitutions and preferred embodiments
  source 1..339: mol_type = other RNA
grmmkvrkggysmarytggharssykkybrrstccasakbvrwnnnnnnnnnnnnnnnnnnnnnnnnnnnnnnnnnnnnnnnnnnnnnnnnnnnnnnnnnnnnnnnnnnnnnnnnnnnnnnnnnnnnnnnnnnnnnnnnnnnnnnnnnnnnnnnnnnnnnnnnnnnnnnnnnnnnnnnnnnnnnnnnnnnnnnnnnnnnnnnnnnnnnnnnnnnnnnnnnnnnnnnnnnnnnnnnnnnnnnnnnnnnnnnnnnnnnnnnnnnnnnnnnnnnnnnnnnnnnnnnnnnnnnnnnnnnnnnnnnnnnnnnnnnnnnnsygkgttcradycmcrkyksbgyma

SEQ ID NO: 615 - RNA, 339 nt, synthetic construct; identical to SEQ ID NO: 614
  misc_feature 1..339: note = Description of Sequence: Synthetic polynucleotide
  variation 44..314: note = a, c, u, or g
  misc_feature 44..314: note = This region may encompass 1-271 nucleotides
  variation 1..339: note = May or may not be present
  misc_feature 1..339: note = See specification as filed for detailed description of substitutions and preferred embodiments
  source 1..339: mol_type = other RNA

SEQ ID NO: 616 - RNA, 342 nt, synthetic construct
  misc_feature 1..342: note = Description of Sequence: Synthetic polynucleotide
  variation 3..6: note = a, c, u, or g
  variation 9..10: note = a, c, u, or g
  variation 12..13: note = a, c, u, or g
  variation 16: note = a, c, u, or g
  variation 25..26: note = a, c, u, or g
  variation 30..32: note = a, c, u, or g
  variation 42: note = a, c, u, or g
  variation 44..317: note = a, c, u, or g
  misc_feature 47..317: note = This region may encompass 1-271 nucleotides
  variation 319..320: note = a, c, u, or g
  variation 328: note = a, c, u, or g
  variation 332..333: note = a, c, u, or g
  variation 336..340: note = a, c, u, or g
  variation 1..342: note = May or may not be present
  misc_feature 1..342: note = See specification as filed for detailed description of substitutions and preferred embodiments
  source 1..342: mol_type = other RNA
bbnnnndtnnynnarnytgsyhwrnnrbdnnnrdctrtarvnynnnnnnnnnnnnnnnnnnnnnnnnnnnnnnnnnnnnnnnnnnnnnnnnnnnnnnnnnnnnnnnnnnnnnnnnnnnnnnnnnnnnnnnnnnnnnnnnnnnnnnnnnnnnnnnnnnnnnnnnnnnnnnnnnnnnnnnnnnnnnnnnnnnnnnnnnnnnnnnnnnnnnnnnnnnnnnnnnnnnnnnnnnnnnnnnnnnnnnnnnnnnnnnnnnnnnnnnnnnnnnnnnnnnnnnnnnnnnnnnnnnnnnnnnnnnnnnnnnnnnnnnnnnnnnnnnnvnnvgwtyrantcbnnbhnnnnnvd

SEQ ID NO: 617 - RNA, 340 nt, synthetic construct
  misc_feature 1..340: note = Description of Sequence: Synthetic polynucleotide
  variation 45..315: note = a, c, u, or g
  misc_feature 45..315: note = This region may encompass 1-271 nucleotides
  variation 336: note = a, c, u, or g
  variation 1..340: note = May or may not be present
  misc_feature 1..340: note = See specification as filed for detailed description of substitutions and preferred embodiments
  source 1..340: mol_type = other RNA
bbkkbdatagytcagbtgsytagagydkwkractrtagrkymwknnnnnnnnnnnnnnnnnnnnnnnnnnnnnnnnnnnnnnnnnnnnnnnnnnnnnnnnnnnnnnnnnnnnnnnnnnnnnnnnnnnnnnnnnnnnnnnnnnnnnnnnnnnnnnnnnnnnnnnnnnnnnnnnnnnnnnnnnnnnnnnnnnnnnnnnnnnnnnnnnnnnnnnnnnnnnnnnnnnnnnnnnnnnnnnnnnnnnnnnnnnnnnnnnnnnnnnnnnnnnnnnnnnnnnnnnnnnnnnnnnnnnnnnnnnnnnnnnnnnnnnnnnnnnnnsctggwtyrahtcyrrstbsnmsvd

SEQ ID NO: 618 - RNA, 340 nt, synthetic construct
  misc_feature 1..340: note = Description of Sequence: Synthetic polynucleotide
  variation 45..315: note = a, c, u, or g
  misc_feature 45..315: note = This region may encompass 1-271 nucleotides
  variation 1..340: note = May or may not be present
  misc_feature 1..340: note = See specification as filed for detailed description of substitutions and preferred embodiments
  source 1..340: mol_type = other RNA
bbkksdatagytcagytggytagagcdkwkgactrtagrkymwknnnnnnnnnnnnnnnnnnnnnnnnnnnnnnnnnnnnnnnnnnnnnnnnnnnnnnnnnnnnnnnnnnnnnnnnnnnnnnnnnnnnnnnnnnnnnnnnnnnnnnnnnnnnnnnnnnnnnnnnnnnnnnnnnnnnnnnnnnnnnnnnnnnnnnnnnnnnnnnnnnnnnnnnnnnnnnnnnnnnnnnnnnnnnnnnnnnnnnnnnnnnnnnnnnnnnnnnnnnnnnnnnnnnnnnnnnnnnnnnnnnnnnnnnnnnnnnnnnnnnnnnnnnnnnnsctggttyrawtccrrstysdmsva

SEQ ID NO: 619 - RNA, 341 nt, synthetic construct
  misc_feature 1..341: note = Description of Sequence: Synthetic polynucleotide
  variation 2: note = a, c, u, or g
  variation 4..7: note = a, c, u, or g
  variation 12: note = a, c, u, or g
  variation 15..16: note = a, c, u, or g
  variation 21: note = a, c, u, or g
  variation 24..25: note = a, c, u, or g
  variation 28: note = a, c, u, or g
  variation 30..33: note = a, c, u, or g
  variation 36: note = a, c, u, or g
  variation 40..319: note = a, c, u, or g
  misc_feature 46..316: note = This region may encompass 1-271 nucleotides
  variation 327: note = a, c, u, or g
  variation 330..339: note = a, c, u, or g
  variation 1..341: note = May or may not be present
  misc_feature 1..341: note = See specification as filed for detailed description of substitutions and preferred embodiments
  source 1..341: mol_type = other RNA
dndnnnntvrynbrnnhtgknyannrynbnnnnhtnacrnnnnnnnnnnnnnnnnnnnnnnnnnnnnnnnnnnnnnnnnnnnnnnnnnnnnnnnnnnnnnnnnnnnnnnnnnnnnnnnnnnnnnnnnnnnnnnnnnnnnnnnnnnnnnnnnnnnnnnnnnnnnnnnnnnnnnnnnnnnnnnnnnnnnnnnnnnnnnnnnnnnnnnnnnnnnnnnnnnnnnnnnnnnnnnnnnnnnnnnnnnnnnnnnnnnnnnnnnnnnnnnnnnnnnnnnnnnnnnnnnnnnnnnnnnnnnnnnnnnnnnnnnnnnnnnnnnnnnnnndrdtbranhynnnnnnnnnnyv

SEQ ID NO: 620 - RNA, 340 nt, synthetic construct
  misc_feature 1..340: note = Description of Sequence: Synthetic polynucleotide
  variation 15..16: note = a, c, u, or g
  variation 24: note = a, c, u, or g
  variation 27: note = a, c, u, or g
  variation 29..30: note = a, c, u, or g
  variation 41..43: note = a, c, u, or g
  variation 45..315: note = a, c, u, or g
  misc_feature 45..315: note = This region may encompass 1-271 nucleotides
  variation 317..318: note = a, c, u, or g
  variation 326: note = a, c, u, or g
  variation 330: note = a, c, u, or g
  variation 333: note = a, c, u, or g
  variation 1..340: note = May or may not be present
  misc_feature 1..340: note = See specification as filed for detailed description of substitutions and preferred embodiments
  source 1..340: mol_type = other RNA
kbkbshdtrrydbrnnhgktyadnrynynndhythacrhknnnrnnnnnnnnnnnnnnnnnnnnnnnnnnnnnnnnnnnnnnnnnnnnnnnnnnnnnnnnnnnnnnnnnnnnnnnnnnnnnnnnnnnnnnnnnnnnnnnnnnnnnnnnnnnnnnnnnnnnnnnnnnnnnnnnnnnnnnnnnnnnnnnnnnnnnnnnnnnnnnnnnnnnnnnnnnnnnnnnnnnnnnnnnnnnnnnnnnnnnnnnnnnnnnnnnnnnnnnnnnnnnnnnnnnnnnnnnnnnnnnnnnnnnnnnnnnnnnnnnnnnnnnnnnnnnnnbnnrrdtbranhybndvndsdwvyv

SEQ ID NO: 621 - RNA, 340 nt, synthetic construct
  misc_feature 1..340: note = Description of Sequence: Synthetic polynucleotide
  variation 45..315: note = a, c, u, or g
  misc_feature 45..315: note = This region may encompass 1-271 nucleotides
  variation 317..318: note = a, c, u, or g
  variation 330: note = a, c, u, or g
  variation 1..340: note = May or may not be present
  misc_feature 1..340: note = See specification as filed for detailed description of substitutions and preferred embodiments
  source 1..340: mol_type = other RNA
kbkbsydtrgydbrbhtgktyadhryvyhhdyythacahkhddrnnnnnnnnnnnnnnnnnnnnnnnnnnnnnnnnnnnnnnnnnnnnnnnnnnnnnnnnnnnnnnnnnnnnnnnnnnnnnnnnnnnnnnnnnnnnnnnnnnnnnnnnnnnnnnnnnnnnnnnnnnnnnnnnnnnnnnnnnnnnnnnnnnnnnnnnnnnnnnnnnnnnnnnnnnnnnnnnnnnnnnnnnnnnnnnnnnnnnnnnnnnnnnnnnnnnnnnnnnnnnnnnnnnnnnnnnnnnnnnnnnnnnnnnnnnnnnnnnnnnnnnnnnnnnnnbnngrdtbradhyyndvhrsdwvya

SEQ ID NO: 622 - RNA, 76 nt, synthetic construct
  misc_feature 1..76: note = Description of Sequence: Synthetic oligonucleotide
  source 1..76: mol_type = other RNA
ggctccgtggcgcaatggatagcgcattggacttcaaattcaaaggttccgggttcgagtcccggcggagtcgcca

SEQ ID NO: 623 - RNA, 76 nt, synthetic construct; identical to SEQ ID NO: 622
  misc_feature 1..76: note = Description of Sequence: Synthetic oligonucleotide
  source 1..76: mol_type = other RNA

SEQ ID NO: 624 - RNA, 76 nt, synthetic construct; identical to SEQ ID NO: 622
  misc_feature 1..76: note = Description of Sequence: Synthetic oligonucleotide
  source 1..76: mol_type = other RNA

SEQ ID NO: 625 - RNA, 76 nt, synthetic construct; identical to SEQ ID NO: 622
  misc_feature 1..76: note = Description of Sequence: Synthetic oligonucleotide
  source 1..76: mol_type = other RNA

SEQ ID NO: 626 - RNA, 76 nt, synthetic construct; identical to SEQ ID NO: 622
  misc_feature 1..76: note = Description of Sequence: Synthetic oligonucleotide
  source 1..76: mol_type = other RNA

SEQ ID NO: 627 - RNA, 76 nt, synthetic construct; identical to SEQ ID NO: 622
  misc_feature 1..76: note = Description of Sequence: Synthetic oligonucleotide
  source 1..76: mol_type = other RNA

SEQ ID NO: 628 - RNA, 76 nt, synthetic construct; identical to SEQ ID NO: 622
  misc_feature 1..76: note = Description of Sequence: Synthetic oligonucleotide
  source 1..76: mol_type = other RNA

SEQ ID NO: 629 - RNA, 76 nt, synthetic construct; identical to SEQ ID NO: 622
  misc_feature 1..76: note = Description of Sequence: Synthetic oligonucleotide
  source 1..76: mol_type = other RNA

SEQ ID NO: 630 - RNA, 76 nt, synthetic construct; identical to SEQ ID NO: 622
  misc_feature 1..76: note = Description of Sequence: Synthetic oligonucleotide
  source 1..76: mol_type = other RNA

SEQ ID NO: 631 - RNA, 76 nt, synthetic construct; identical to SEQ ID NO: 622
  misc_feature 1..76: note = Description of Sequence: Synthetic oligonucleotide
  source 1..76: mol_type = other RNA

SEQ ID NO: 632 - RNA, 76 nt, synthetic construct; identical to SEQ ID NO: 622
  misc_feature 1..76: note = Description of Sequence: Synthetic oligonucleotide
  source 1..76: mol_type = other RNA

SEQ ID NO: 633 - RNA, 76 nt, synthetic construct; identical to SEQ ID NO: 622
  misc_feature 1..76: note = Description of Sequence: Synthetic oligonucleotide
  source 1..76: mol_type = other RNA

SEQ ID NO: 634 - RNA, 76 nt, synthetic construct; identical to SEQ ID NO: 622
  misc_feature 1..76: note = Description of Sequence: Synthetic oligonucleotide
  source 1..76: mol_type = other RNA

SEQ ID NO: 635 - RNA, 76 nt, synthetic construct; identical to SEQ ID NO: 622
  misc_feature 1..76: note = Description of Sequence: Synthetic oligonucleotide
  source 1..76: mol_type = other RNA

SEQ ID NO: 636 - RNA, 76 nt, synthetic construct; identical to SEQ ID NO: 622
  misc_feature 1..76: note = Description of Sequence: Synthetic oligonucleotide
  source 1..76: mol_type = other RNA

SEQ ID NO: 637 - RNA, 76 nt, synthetic construct; identical to SEQ ID NO: 622
  misc_feature 1..76: note = Description of Sequence: Synthetic oligonucleotide
  source 1..76: mol_type = other RNA

SEQ ID NO: 638 - RNA, 76 nt, synthetic construct; identical to SEQ ID NO: 622
  misc_feature 1..76: note = Description of Sequence: Synthetic oligonucleotide
  source 1..76: mol_type = other RNA

SEQ ID NO: 639 - RNA, 76 nt, synthetic construct; identical to SEQ ID NO: 622
  misc_feature 1..76: note = Description of Sequence: Synthetic oligonucleotide
  source 1..76: mol_type = other RNA

SEQ ID NO: 640 - RNA, 76 nt, synthetic construct; identical to SEQ ID NO: 622
  misc_feature 1..76: note = Description of Sequence: Synthetic oligonucleotide
  source 1..76: mol_type = other RNA

SEQ ID NO: 641 - RNA, 76 nt, synthetic construct; identical to SEQ ID NO: 622
  misc_feature 1..76: note = Description of Sequence: Synthetic oligonucleotide
  source 1..76: mol_type = other RNA

SEQ ID NO: 642 - RNA, 76 nt, synthetic construct; identical to SEQ ID NO: 622
  misc_feature 1..76: note = Description of Sequence: Synthetic oligonucleotide
  source 1..76: mol_type = other RNA

SEQ ID NO: 643 - RNA, 76 nt, synthetic construct; identical to SEQ ID NO: 622
  misc_feature 1..76: note = Description of Sequence: Synthetic oligonucleotide
  source 1..76: mol_type = other RNA

SEQ ID NO: 644 - RNA, 76 nt, synthetic construct; identical to SEQ ID NO: 622
  misc_feature 1..76: note = Description of Sequence: Synthetic oligonucleotide
  source 1..76: mol_type = other RNA

SEQ ID NO: 645 - RNA, 76 nt, synthetic construct; identical to SEQ ID NO: 622
  misc_feature 1..76: note = Description of Sequence: Synthetic oligonucleotide
  source 1..76: mol_type = other RNA

SEQ ID NO: 646 - RNA, 76 nt, synthetic construct; identical to SEQ ID NO: 622
  misc_feature 1..76: note = Description of Sequence: Synthetic oligonucleotide
  source 1..76: mol_type = other RNA

SEQ ID NO: 647 - RNA, 76 nt, synthetic construct; identical to SEQ ID NO: 622
  misc_feature 1..76: note = Description of Sequence: Synthetic oligonucleotide
  source 1..76: mol_type = other RNA

SEQ ID NO: 648 - RNA, 76 nt, synthetic construct; identical to SEQ ID NO: 622
  misc_feature 1..76: note = Description of Sequence: Synthetic oligonucleotide
  source 1..76: mol_type = other RNA

SEQ ID NO: 649 - RNA, 76 nt, synthetic construct; identical to SEQ ID NO: 622
  misc_feature 1..76: note = Description of Sequence: Synthetic oligonucleotide
  source 1..76: mol_type = other RNA

SEQ ID NO: 650 - RNA, 76 nt, synthetic construct; identical to SEQ ID NO: 622
  misc_feature 1..76: note = Description of Sequence: Synthetic oligonucleotide
  source 1..76: mol_type = other RNA

SEQ ID NO: 651 - RNA, 76 nt, synthetic construct; identical to SEQ ID NO: 622
  misc_feature 1..76: note = Description of Sequence: Synthetic oligonucleotide
  source 1..76: mol_type = other RNA

SEQ ID NO: 652 - RNA, 76 nt, synthetic construct; identical to SEQ ID NO: 622
  misc_feature 1..76: note = Description of Sequence: Synthetic oligonucleotide
  source 1..76: mol_type = other RNA

SEQ ID NO: 653 - RNA, 76 nt, synthetic construct; identical to SEQ ID NO: 622
  misc_feature 1..76: note = Description of Sequence: Synthetic oligonucleotide
  source 1..76: mol_type = other RNA

SEQ ID NO: 654 - RNA, 76 nt, synthetic construct; identical to SEQ ID NO: 622
  misc_feature 1..76: note = Description of Sequence: Synthetic oligonucleotide
  source 1..76: mol_type = other RNA

SEQ ID NO: 655 - RNA, 76 nt, synthetic construct; identical to SEQ ID NO: 622
  misc_feature 1..76: note = Description of Sequence: Synthetic oligonucleotide
  source 1..76: mol_type = other RNA

SEQ ID NO: 656 - RNA, 76 nt, synthetic construct; identical to SEQ ID NO: 622
  misc_feature 1..76: note = Description of Sequence: Synthetic oligonucleotide
  source 1..76: mol_type = other RNA

SEQ ID NO: 657 - RNA, 76 nt, synthetic construct; identical to SEQ ID NO: 622
  misc_feature 1..76: note = Description of Sequence: Synthetic oligonucleotide
  source 1..76: mol_type = other RNA

SEQ ID NO: 658 - RNA, 76 nt, synthetic construct; identical to SEQ ID NO: 622
  misc_feature 1..76: note = Description of Sequence: Synthetic oligonucleotide
  source 1..76: mol_type = other RNA

SEQ ID NO: 659 - RNA, 76 nt, synthetic construct; identical to SEQ ID NO: 622
  misc_feature 1..76: note = Description of Sequence: Synthetic oligonucleotide
  source 1..76: mol_type = other RNA

SEQ ID NO: 660 - RNA, 76 nt, synthetic construct; identical to SEQ ID NO: 622
  misc_feature 1..76: note = Description of Sequence: Synthetic oligonucleotide
  source 1..76: mol_type = other RNA

SEQ ID NO: 661 - RNA, 76 nt, synthetic construct; identical to SEQ ID NO: 622
  misc_feature 1..76: note = Description of Sequence: Synthetic oligonucleotide
  source 1..76: mol_type = other RNA

SEQ ID NO: 662 - RNA, 76 nt, synthetic construct; identical to SEQ ID NO: 622
  misc_feature 1..76: note = Description of Sequence: Synthetic oligonucleotide
  source 1..76: mol_type = other RNA

SEQ ID NO: 663 - RNA, 76 nt, synthetic construct; identical to SEQ ID NO: 622
  misc_feature 1..76: note = Description of Sequence: Synthetic oligonucleotide
  source 1..76: mol_type = other RNA

SEQ ID NO: 664 - RNA, 76 nt, synthetic construct; identical to SEQ ID NO: 622
  misc_feature 1..76: note = Description of Sequence: Synthetic oligonucleotide
  source 1..76: mol_type = other RNA

SEQ ID NO: 665 - RNA, 76 nt, synthetic construct; identical to SEQ ID NO: 622
  misc_feature 1..76: note = Description of Sequence: Synthetic oligonucleotide
  source 1..76: mol_type = other RNA

SEQ ID NO: 666 - RNA, 76 nt, synthetic construct; identical to SEQ ID NO: 622
  misc_feature 1..76: note = Description of Sequence: Synthetic oligonucleotide
  source 1..76: mol_type = other RNA

SEQ ID NO: 667 - RNA, 76 nt, synthetic construct; identical to SEQ ID NO: 622
  misc_feature 1..76: note = Description of Sequence: Synthetic oligonucleotide
  source 1..76: mol_type = other RNA

SEQ ID NO: 668 - RNA, 76 nt, synthetic construct; identical to SEQ ID NO: 622
  misc_feature 1..76: note = Description of Sequence: Synthetic oligonucleotide
  source 1..76: mol_type = other RNA

SEQ ID NO: 669 - RNA, 76 nt, synthetic construct; identical to SEQ ID NO: 622
  misc_feature 1..76: note = Description of Sequence: Synthetic oligonucleotide
  source 1..76: mol_type = other RNA

SEQ ID NO: 670 - RNA, 76 nt, synthetic construct; identical to SEQ ID NO: 622
  misc_feature 1..76: note = Description of Sequence: Synthetic oligonucleotide
  source 1..76: mol_type = other RNA

SEQ ID NO: 671 - RNA, 76 nt, synthetic construct; identical to SEQ ID NO: 622
  misc_feature 1..76: note = Description of Sequence: Synthetic oligonucleotide
  source 1..76: mol_type = other RNA

SEQ ID NO: 672 - RNA, 76 nt, synthetic construct; identical to SEQ ID NO: 622
  misc_feature 1..76: note = Description of Sequence: Synthetic oligonucleotide
  source 1..76: mol_type = other RNA

SEQ ID NO: 673 - RNA, 76 nt, synthetic construct; identical to SEQ ID NO: 622
  misc_feature 1..76: note = Description of Sequence: Synthetic oligonucleotide
  source 1..76: mol_type = other RNA

SEQ ID NO: 674 - RNA, 76 nt, synthetic construct; identical to SEQ ID NO: 622
  misc_feature 1..76: note = Description of Sequence: Synthetic oligonucleotide
  source 1..76: mol_type = other RNA

SEQ ID NO: 675 - RNA, 76 nt, synthetic construct; identical to SEQ ID NO: 622
  misc_feature 1..76: note = Description of Sequence: Synthetic oligonucleotide
  source 1..76: mol_type = other RNA

SEQ ID NO: 676 - RNA, 76 nt, synthetic construct; identical to SEQ ID NO: 622
  misc_feature 1..76: note = Description of Sequence: Synthetic oligonucleotide
  source 1..76: mol_type = other RNA

SEQ ID NO: 677 - RNA, 76 nt, synthetic construct; identical to SEQ ID NO: 622
  misc_feature 1..76: note = Description of Sequence: Synthetic oligonucleotide
  source 1..76: mol_type = other RNA

SEQ ID NO: 678 - RNA, 76 nt, synthetic construct; identical to SEQ ID NO: 622
  misc_feature 1..76: note = Description of Sequence: Synthetic oligonucleotide
  source 1..76: mol_type = other RNA

SEQ ID NO: 679 - RNA, 76 nt, synthetic construct; identical to SEQ ID NO: 622
  misc_feature 1..76: note = Description of Sequence: Synthetic oligonucleotide
  source 1..76: mol_type = other RNA

SEQ ID NO: 680 - RNA, 76 nt, synthetic construct; identical to SEQ ID NO: 622
  misc_feature 1..76: note = Description of Sequence: Synthetic oligonucleotide
  source 1..76: mol_type = other RNA

SEQ ID NO: 681 - RNA, 76 nt, synthetic construct; identical to SEQ ID NO: 622
  misc_feature 1..76: note = Description of Sequence: Synthetic oligonucleotide
  source 1..76: mol_type = other RNA

SEQ ID NO: 682 - RNA, 76 nt, synthetic construct; identical to SEQ ID NO: 622
  misc_feature 1..76: note = Description of Sequence: Synthetic oligonucleotide
  source 1..76: mol_type = other RNA

SEQ ID NO: 683 - RNA, 76 nt, synthetic construct; identical to SEQ ID NO: 622
  misc_feature 1..76: note = Description of Sequence: Synthetic oligonucleotide
  source 1..76: mol_type = other RNA

SEQ ID NO: 684 - RNA, 76 nt, synthetic construct; identical to SEQ ID NO: 622
  misc_feature 1..76: note = Description of Sequence: Synthetic oligonucleotide
  source 1..76: mol_type = other RNA

SEQ ID NO: 685 - RNA, 76 nt, synthetic construct; identical to SEQ ID NO: 622
  misc_feature 1..76: note = Description of Sequence: Synthetic oligonucleotide
  source 1..76: mol_type = other RNA

SEQ ID NO: 686 - RNA, 76 nt, synthetic construct; identical to SEQ ID NO: 622
  misc_feature 1..76: note = Description of Sequence: Synthetic oligonucleotide
  source 1..76: mol_type = other RNA

SEQ ID NO: 687 - RNA, 76 nt, synthetic construct; identical to SEQ ID NO: 622
  misc_feature 1..76: note = Description of Sequence: Synthetic oligonucleotide
  source 1..76: mol_type = other RNA

SEQ ID NO: 688 - RNA, 76 nt, synthetic construct; identical to SEQ ID NO: 622
  misc_feature 1..76: note = Description of Sequence: Synthetic oligonucleotide
  source 1..76: mol_type = other RNA

SEQ ID NO: 689 - RNA, 76 nt, synthetic construct; identical to SEQ ID NO: 622
  misc_feature 1..76: note = Description of Sequence: Synthetic oligonucleotide
  source 1..76: mol_type = other RNA

SEQ ID NO: 690 - RNA, 76 nt, synthetic construct; identical to SEQ ID NO: 622
  misc_feature 1..76: note = Description of Sequence: Synthetic oligonucleotide
  source 1..76: mol_type = other RNA

SEQ ID NO: 691 - RNA, 76 nt, synthetic construct; identical to SEQ ID NO: 622
  misc_feature 1..76: note = Description of Sequence: Synthetic oligonucleotide
  source 1..76: mol_type = other RNA

SEQ ID NO: 692 - RNA, 76 nt, synthetic construct; identical to SEQ ID NO: 622
  misc_feature 1..76: note = Description of Sequence: Synthetic oligonucleotide
  source 1..76: mol_type = other RNA

SEQ ID NO: 693 - RNA, 76 nt, synthetic construct; identical to SEQ ID NO: 622
  misc_feature 1..76: note = Description of Sequence: Synthetic oligonucleotide
  source 1..76: mol_type = other RNA

SEQ ID NO: 694 - RNA, 76 nt, synthetic construct; identical to SEQ ID NO: 622
  misc_feature 1..76: note = Description of Sequence: Synthetic oligonucleotide
  source 1..76: mol_type = other RNA

SEQ ID NO: 695 - RNA, 76 nt, synthetic construct; identical to SEQ ID NO: 622
  misc_feature 1..76: note = Description of Sequence: Synthetic oligonucleotide
  source 1..76: mol_type = other RNA

SEQ ID NO: 696 - RNA, 76 nt, synthetic construct; identical to SEQ ID NO: 622
  misc_feature 1..76: note = Description of Sequence: Synthetic oligonucleotide
  source 1..76: mol_type = other RNA

SEQ ID NO: 697 - RNA, 76 nt, synthetic construct; identical to SEQ ID NO: 622
  misc_feature 1..76: note = Description of Sequence: Synthetic oligonucleotide
  source 1..76: mol_type = other RNA

SEQ ID NO: 698 - RNA, 76 nt, synthetic construct; identical to SEQ ID NO: 622
  misc_feature 1..76: note = Description of Sequence: Synthetic oligonucleotide
  source 1..76: mol_type = other RNA

SEQ ID NO: 699 - RNA, 76 nt, synthetic construct; identical to SEQ ID NO: 622
  misc_feature 1..76: note = Description of Sequence: Synthetic oligonucleotide
  source 1..76: mol_type = other RNA

SEQ ID NO: 700 - RNA, 76 nt, synthetic construct; identical to SEQ ID NO: 622
  misc_feature 1..76: note = Description of Sequence: Synthetic oligonucleotide
  source 1..76: mol_type = other RNA

SEQ ID NO: 701 - RNA, 76 nt, synthetic construct; identical to SEQ ID NO: 622
  misc_feature 1..76: note = Description of Sequence: Synthetic oligonucleotide
  source 1..76: mol_type = other RNA

SEQ ID NO: 702 - RNA, 76 nt, synthetic construct; identical to SEQ ID NO: 622
  misc_feature 1..76: note = Description of Sequence: Synthetic oligonucleotide
  source 1..76: mol_type = other RNA

SEQ ID NO: 703 - RNA, 76 nt, synthetic construct; identical to SEQ ID NO: 622
  misc_feature 1..76: note = Description of Sequence: Synthetic oligonucleotide
  source 1..76: mol_type = other RNA

SEQ ID NO: 704 - RNA, 76 nt, synthetic construct; identical to SEQ ID NO: 622
  misc_feature 1..76: note = Description of Sequence: Synthetic oligonucleotide
  source 1..76: mol_type = other RNA

SEQ ID NO: 705 - RNA, 76 nt, synthetic construct; identical to SEQ ID NO: 622
  misc_feature 1..76: note = Description of Sequence: Synthetic oligonucleotide
  source 1..76: mol_type = other RNA

SEQ ID NO: 706 - RNA, 76 nt, synthetic construct; identical to SEQ ID NO: 622
  misc_feature 1..76: note = Description of Sequence: Synthetic oligonucleotide
  source 1..76: mol_type = other RNA

SEQ ID NO: 707 - RNA, 76 nt, synthetic construct; identical to SEQ ID NO: 622
  misc_feature 1..76: note = Description of Sequence: Synthetic oligonucleotide
  source 1..76: mol_type = other RNA

SEQ ID NO: 708 - RNA, 76 nt, synthetic construct; identical to SEQ ID NO: 622
  misc_feature 1..76: note = Description of Sequence: Synthetic oligonucleotide
  source 1..76: mol_type = other RNA

SEQ ID NO: 709 - RNA, 76 nt, synthetic construct; identical to SEQ ID NO: 622
  misc_feature 1..76: note = Description of Sequence: Synthetic oligonucleotide
  source 1..76: mol_type = other RNA

SEQ ID NO: 710 - RNA, 76 nt, synthetic construct; identical to SEQ ID NO: 622
  misc_feature 1..76: note = Description of Sequence: Synthetic oligonucleotide
  source 1..76: mol_type = other RNA

SEQ ID NO: 711 - RNA, 76 nt, synthetic construct; identical to SEQ ID NO: 622
  misc_feature 1..76: note = Description of Sequence: Synthetic oligonucleotide
  source 1..76: mol_type = other RNA

SEQ ID NO: 712 - RNA, 76 nt, synthetic construct; identical to SEQ ID NO: 622
  misc_feature 1..76: note = Description of Sequence: Synthetic oligonucleotide
  source 1..76: mol_type = other RNA

SEQ ID NO: 713 - RNA, 76 nt, synthetic construct; identical to SEQ ID NO: 622
  misc_feature 1..76: note = Description of Sequence: Synthetic oligonucleotide
  source 1..76: mol_type = other RNA

SEQ ID NO: 714 - RNA, 76 nt, synthetic construct; identical to SEQ ID NO: 622
  misc_feature 1..76: note = Description of Sequence: Synthetic oligonucleotide
  source 1..76: mol_type = other RNA

SEQ ID NO: 715 - RNA, 76 nt, synthetic construct; identical to SEQ ID NO: 622
  misc_feature 1..76: note = Description of Sequence: Synthetic oligonucleotide
  source 1..76: mol_type = other RNA

SEQ ID NO: 716 - RNA, 76 nt, synthetic construct; identical to SEQ ID NO: 622
  misc_feature 1..76: note = Description of Sequence: Synthetic oligonucleotide
  source 1..76: mol_type = other RNA

SEQ ID NO: 717 - RNA, 76 nt, synthetic construct; identical to SEQ ID NO: 622
  misc_feature 1..76: note = Description of Sequence: Synthetic oligonucleotide
  source 1..76: mol_type = other RNA

SEQ ID NO: 718 - RNA, 76 nt, synthetic construct; identical to SEQ ID NO: 622
  misc_feature 1..76: note = Description of Sequence: Synthetic oligonucleotide
  source 1..76: mol_type = other RNA

SEQ ID NO: 719 - RNA, 76 nt, synthetic construct; identical to SEQ ID NO: 622
  misc_feature 1..76: note = Description of Sequence: Synthetic oligonucleotide
  source 1..76: mol_type = other RNA

SEQ ID NO: 720 - RNA, 76 nt, synthetic construct; identical to SEQ ID NO: 622
  misc_feature 1..76: note = Description of Sequence: Synthetic oligonucleotide
  source 1..76: mol_type = other RNA

SEQ ID NO: 721 - RNA, 76 nt, synthetic construct; identical to SEQ ID NO: 622
  misc_feature 1..76: note = Description of Sequence: Synthetic oligonucleotide
  source 1..76: mol_type = other RNA

SEQ ID NO: 722 - RNA, 76 nt, synthetic construct; identical to SEQ ID NO: 622
  misc_feature 1..76: note = Description of Sequence: Synthetic oligonucleotide
  source 1..76: mol_type = other RNA

SEQ ID NO: 723 - RNA, 76 nt, synthetic construct; identical to SEQ ID NO: 622
  misc_feature 1..76: note = Description of Sequence: Synthetic oligonucleotide
  source 1..76: mol_type = other RNA

SEQ ID NO: 724 - RNA, 76 nt, synthetic construct; identical to SEQ ID NO: 622
  misc_feature 1..76: note = Description of Sequence: Synthetic oligonucleotide
  source 1..76: mol_type = other RNA

SEQ ID NO: 725 - RNA, 76 nt, synthetic construct; identical to SEQ ID NO: 622
  misc_feature 1..76: note = Description of Sequence: Synthetic oligonucleotide
  source 1..76: mol_type = other RNA

SEQ ID NO: 726 - RNA, 76 nt, synthetic construct; identical to SEQ ID NO: 622
  misc_feature 1..76: note = Description of Sequence: Synthetic oligonucleotide
  source 1..76: mol_type = other RNA

SEQ ID NO: 727 - RNA, 76 nt, synthetic construct; identical to SEQ ID NO: 622
  misc_feature 1..76: note = Description of Sequence: Synthetic oligonucleotide
  source 1..76: mol_type = other RNA

SEQ ID NO: 728 - RNA, 76 nt, synthetic construct; identical to SEQ ID NO: 622
  misc_feature 1..76: note = Description of Sequence: Synthetic oligonucleotide
  source 1..76: mol_type = other RNA

SEQ ID NO: 729 - RNA, 76 nt, synthetic construct; identical to SEQ ID NO: 622
  misc_feature 1..76: note = Description of Sequence: Synthetic oligonucleotide
  source 1..76: mol_type = other RNA

SEQ ID NO: 730 - RNA, 76 nt, synthetic construct; identical to SEQ ID NO: 622
  misc_feature 1..76: note = Description of Sequence: Synthetic oligonucleotide
  source 1..76: mol_type = other RNA

SEQ ID NO: 731 - RNA, 76 nt, synthetic construct; identical to SEQ ID NO: 622
  misc_feature 1..76: note = Description of Sequence: Synthetic oligonucleotide
  source 1..76: mol_type = other RNA

SEQ ID NO: 732 - RNA, 76 nt, synthetic construct; identical to SEQ ID NO: 622
  misc_feature 1..76: note = Description of Sequence: Synthetic oligonucleotide
  source 1..76: mol_type = other RNA

SEQ ID NO: 733 - RNA, 76 nt, synthetic construct; identical to SEQ ID NO: 622
  misc_feature 1..76: note = Description of Sequence: Synthetic oligonucleotide
  source 1..76: mol_type = other RNA

SEQ ID NO: 734 - RNA, 76 nt, synthetic construct; identical to SEQ ID NO: 622
  misc_feature 1..76: note = Description of Sequence: Synthetic oligonucleotide
  source 1..76: mol_type = other RNA

SEQ ID NO: 735 - RNA, 76 nt, synthetic construct; identical to SEQ ID NO: 622
  misc_feature 1..76: note = Description of Sequence: Synthetic oligonucleotide
  source 1..76: mol_type = other RNA

SEQ ID NO: 736 - RNA, 76 nt, synthetic construct; identical to SEQ ID NO: 622
  misc_feature 1..76: note = Description of Sequence: Synthetic oligonucleotide
  source 1..76: mol_type = other RNA

SEQ ID NO: 737 - RNA, 76 nt, synthetic construct; identical to SEQ ID NO: 622
  misc_feature 1..76: note = Description of Sequence: Synthetic oligonucleotide
  source 1..76: mol_type = other RNA

SEQ ID NO: 738 - RNA, 76 nt, synthetic construct; identical to SEQ ID NO: 622
  misc_feature 1..76: note = Description of Sequence: Synthetic oligonucleotide
  source 1..76: mol_type = other RNA

SEQ ID NO: 739 - RNA, 76 nt, synthetic construct; identical to SEQ ID NO: 622
  misc_feature 1..76: note = Description of Sequence: Synthetic oligonucleotide
  source 1..76: mol_type = other RNA

SEQ ID NO: 740 - RNA, 76 nt, synthetic construct; identical to SEQ ID NO: 622
  misc_feature 1..76: note = Description of Sequence: Synthetic oligonucleotide
  source 1..76: mol_type = other RNA

SEQ ID NO: 741 - RNA, 76 nt, synthetic construct; identical to SEQ ID NO: 622
  misc_feature 1..76: note = Description of Sequence: Synthetic oligonucleotide
  source 1..76: mol_type = other RNA

SEQ ID NO: 742 - RNA, 76 nt, synthetic construct; identical to SEQ ID NO: 622
  misc_feature 1..76: note = Description of Sequence: Synthetic oligonucleotide
  source 1..76: mol_type = other RNA

SEQ ID NO: 743 - RNA, 76 nt, synthetic construct; identical to SEQ ID NO: 622
  misc_feature 1..76: note = Description of Sequence: Synthetic oligonucleotide
  source 1..76: mol_type = other RNA

SEQ ID NO: 744 - RNA, 76 nt, synthetic construct; identical to SEQ ID NO: 622
  misc_feature 1..76: note = Description of Sequence: Synthetic oligonucleotide
  source 1..76: mol_type = other RNA

SEQ ID NO: 745 - RNA, 76 nt, synthetic construct; identical to SEQ ID NO: 622
  misc_feature 1..76: note = Description of Sequence: Synthetic oligonucleotide
  source 1..76: mol_type = other RNA

SEQ ID NO: 746 - RNA, 76 nt, synthetic construct; identical to SEQ ID NO: 622
  misc_feature 1..76: note = Description of Sequence: Synthetic oligonucleotide
  source 1..76: mol_type = other RNA

SEQ ID NO: 747 - RNA, 76 nt, synthetic construct; identical to SEQ ID NO: 622
  misc_feature 1..76: note = Description of Sequence: Synthetic oligonucleotide
  source 1..76: mol_type = other RNA

SEQ ID NO: 748 - RNA, 76 nt, synthetic construct; identical to SEQ ID NO: 622
  misc_feature 1..76: note = Description of Sequence: Synthetic oligonucleotide
  source 1..76: mol_type = other RNA

SEQ ID NO: 749 - RNA, 76 nt, synthetic construct; identical to SEQ ID NO: 622
  misc_feature 1..76: note = Description of Sequence: Synthetic oligonucleotide
  source 1..76: mol_type = other RNA

SEQ ID NO: 750 - RNA, 76 nt, synthetic construct; identical to SEQ ID NO: 622
  misc_feature 1..76: note = Description of Sequence: Synthetic oligonucleotide
  source 1..76: mol_type = other RNA

SEQ ID NO: 751 - RNA, 76 nt, synthetic construct; identical to SEQ ID NO: 622
  misc_feature 1..76: note = Description of Sequence: Synthetic oligonucleotide
  source 1..76: mol_type = other RNA

SEQ ID NO: 752 - RNA, 76 nt, synthetic construct; identical to SEQ ID NO: 622
  misc_feature 1..76: note = Description of Sequence: Synthetic oligonucleotide
  source 1..76: mol_type = other RNA

SEQ ID NO: 753 - RNA, 76 nt, synthetic construct; identical to SEQ ID NO: 622
  misc_feature 1..76: note = Description of Sequence: Synthetic oligonucleotide
  source 1..76: mol_type = other RNA

SEQ ID NO: 754 - RNA, 76 nt, synthetic construct; identical to SEQ ID NO: 622
  misc_feature 1..76: note = Description of Sequence: Synthetic oligonucleotide
  source 1..76: mol_type = other RNA

SEQ ID NO: 755 - RNA, 76 nt, synthetic construct; identical to SEQ ID NO: 622
  misc_feature 1..76: note = Description of Sequence: Synthetic oligonucleotide
  source 1..76: mol_type = other RNA

SEQ ID NO: 756 - RNA, 76 nt, synthetic construct; identical to SEQ ID NO: 622
  misc_feature 1..76: note = Description of Sequence: Synthetic oligonucleotide
  source 1..76: mol_type = other RNA

SEQ ID NO: 757 - RNA, 76 nt, synthetic construct; identical to SEQ ID NO: 622
  misc_feature 1..76: note = Description of Sequence: Synthetic oligonucleotide
  source 1..76: mol_type = other RNA

SEQ ID NO: 758 - RNA, 76 nt, synthetic construct; identical to SEQ ID NO: 622
  misc_feature 1..76: note = Description of Sequence: Synthetic oligonucleotide
  source 1..76: mol_type = other RNA

SEQ ID NO: 759 - RNA, 76 nt, synthetic construct; identical to SEQ ID NO: 622
  misc_feature 1..76: note = Description of Sequence: Synthetic oligonucleotide
  source 1..76: mol_type = other RNA

SEQ ID NO: 760 - RNA, 76 nt, synthetic construct; identical to SEQ ID NO: 622
  misc_feature 1..76: note = Description of Sequence: Synthetic oligonucleotide
  source 1..76: mol_type = other RNA

SEQ ID NO: 761 - RNA, 76 nt, synthetic construct; identical to SEQ ID NO: 622
  misc_feature 1..76: note = Description of Sequence: Synthetic oligonucleotide
  source 1..76: mol_type = other RNA

SEQ ID NO: 762 - RNA, 76 nt, synthetic construct; identical to SEQ ID NO: 622
  misc_feature 1..76: note = Description of Sequence: Synthetic oligonucleotide
  source 1..76: mol_type = other RNA

SEQ ID NO: 763 - RNA, 76 nt, synthetic construct; identical to SEQ ID NO: 622
  misc_feature 1..76: note = Description of Sequence: Synthetic oligonucleotide
  source 1..76: mol_type = other RNA

SEQ ID NO: 764 - RNA, 76 nt, synthetic construct; identical to SEQ ID NO: 622
  misc_feature 1..76: note = Description of Sequence: Synthetic oligonucleotide
  source 1..76: mol_type = other RNA

SEQ ID NO: 765 - RNA, 76 nt, synthetic construct; identical to SEQ ID NO: 622
  misc_feature 1..76: note = Description of Sequence: Synthetic oligonucleotide
  source 1..76: mol_type = other RNA

SEQ ID NO: 766 - RNA, 76 nt, synthetic construct; identical to SEQ ID NO: 622
  misc_feature 1..76: note = Description of Sequence: Synthetic oligonucleotide
  source 1..76: mol_type = other RNA

SEQ ID NO: 767 - RNA, 76 nt, synthetic construct; identical to SEQ ID NO: 622
  misc_feature 1..76: note = Description of Sequence: Synthetic oligonucleotide
  source 1..76: mol_type = other RNA

SEQ ID NO: 768 - RNA, 76 nt, synthetic construct; identical to SEQ ID NO: 622
  misc_feature 1..76: note = Description of Sequence: Synthetic oligonucleotide
  source 1..76: mol_type = other RNA

SEQ ID NO: 769 - RNA, 76 nt, synthetic construct; identical to SEQ ID NO: 622
  misc_feature 1..76: note = Description of Sequence: Synthetic oligonucleotide
  source 1..76: mol_type = other RNA

SEQ ID NO: 770 - RNA, 76 nt, synthetic construct; identical to SEQ ID NO: 622
  misc_feature 1..76: note = Description of Sequence: Synthetic oligonucleotide
  source 1..76: mol_type = other RNA

SEQ ID NO: 771 - RNA, 76 nt, synthetic construct; identical to SEQ ID NO: 622
  misc_feature 1..76: note = Description of Sequence: Synthetic oligonucleotide
  source 1..76: mol_type = other RNA

SEQ ID NO: 772 - RNA, 76 nt, synthetic construct; identical to SEQ ID NO: 622
  misc_feature 1..76: note = Description of Sequence: Synthetic oligonucleotide
  source 1..76: mol_type = other RNA

SEQ ID NO: 773 - RNA, 76 nt, synthetic construct; identical to SEQ ID NO: 622
  misc_feature 1..76: note = Description of Sequence: Synthetic oligonucleotide
  source 1..76: mol_type = other RNA

SEQ ID NO: 774 - RNA, 76 nt, synthetic construct; identical to SEQ ID NO: 622
  misc_feature 1..76: note = Description of Sequence: Synthetic oligonucleotide
  source 1..76: mol_type = other RNA

SEQ ID NO: 775 - DNA, 76 bp, synthetic construct
  misc_feature 1..76: note = Description of sequence: 2'MOE-Modified TREMs
  source 1..76: mol_type = other DNA
  misc_feature 1..76: note = DNA/RNA hybrid molecule
  misc_feature 1: note = DNA
  misc_feature 2..76: note = RNA
ggctccgtggcgcaatggatagcgcattggacttcaaattcaaaggttccgggttcgagtcccggcggagtcgcca

SEQ ID NO: 776 - DNA, 76 bp, synthetic construct; identical to SEQ ID NO: 775
  misc_feature 1..76: note = Description of sequence: 2'MOE-Modified TREMs
  source 1..76: mol_type = other DNA
  misc_feature 1..76: note = DNA/RNA hybrid molecule
  misc_feature 1: note = RNA
  misc_feature 2: note = DNA
  misc_feature 3..76: note = RNA

SEQ ID NO: 777 - DNA, 76 bp, synthetic construct
  misc_feature 1..76: note = Description of sequence: 2'MOE-Modified TREMs
  source 1..76: mol_type = other DNA
  misc_feature 1..76: note = DNA/RNA hybrid molecule
  misc_feature 1..2: note = RNA
  misc_feature 3: note = DNA
  misc_feature 4..76: note = RNA
ggdtccgtggcgcaatggatagcgcattggacttcaaattcaaaggttccgggttcgagtcccggcggagtcgcca

SEQ ID NO: 778 - DNA, 76 bp, synthetic construct; identical to SEQ ID NO: 775
  misc_feature 1..76: note = Description of sequence: 2'MOE-Modified TREMs
  source 1..76: mol_type = other DNA
  misc_feature 1..76: note = DNA/RNA hybrid molecule
  misc_feature 1..3: note = RNA
  misc_feature 4: note = DNA
  misc_feature 5..76: note = RNA

SEQ ID NO: 779 - DNA, 76 bp, synthetic construct
  misc_feature 1..76: note = Description of sequence: 2'MOE-Modified TREMs
  source 1..76: mol_type = other DNA
  misc_feature 1..76: note = DNA/RNA hybrid molecule
  misc_feature 1..4: note = RNA
  misc_feature 5: note = DNA
  misc_feature 6..76: note = RNA
ggctdcgtggcgcaatggatagcgcattggacttcaaattcaaaggttccgggttcgagtcccggcggagtcgcca

SEQ ID NO: 780 - DNA, 76 bp, synthetic construct
  misc_feature 1..76: note = Description of sequence: 2'MOE-Modified TREMs
  source 1..76: mol_type = other DNA
  misc_feature 1..76: note = DNA/RNA hybrid molecule
  misc_feature 1..5: note = RNA
  misc_feature 6: note = DNA
  misc_feature 7..76: note = RNA
ggctcdgtggcgcaatggatagcgcattggacttcaaattcaaaggttccgggttcgagtcccggcggagtcgcca

SEQ ID NO: 781 - DNA, 76 bp, synthetic construct; identical to SEQ ID NO: 775
  misc_feature 1..76: note = Description of sequence: 2'MOE-Modified TREMs
  source 1..76: mol_type = other DNA
  misc_feature 1..76: note = DNA/RNA hybrid molecule
  misc_feature 1..9: note = RNA
  misc_feature 10: note = DNA
  misc_feature 11..76: note = RNA

SEQ ID NO: 782 - DNA, 76 bp, synthetic construct
  misc_feature 1..76: note = Description of sequence: 2'MOE-Modified TREMs
  source 1..76: mol_type = other DNA
  misc_feature 1..76: note = DNA/RNA hybrid molecule
  misc_feature 1..10: note = RNA
  misc_feature 11: note = DNA
  misc_feature 12..76: note = RNA
ggctccgtggdgcaatggatagcgcattggacttcaaattcaaaggttccgggttcgagtcccggcggagtcgcca

SEQ ID NO: 783 - DNA, 76 bp, synthetic construct; identical to SEQ ID NO: 775
  misc_feature 1..76: note = Description of sequence: 2'MOE-Modified TREMs
  source 1..76: mol_type = other DNA
  misc_feature 1..76: note = DNA/RNA hybrid molecule
  misc_feature 1..11: note = RNA
  misc_feature 12: note = DNA
  misc_feature 13..76: note = RNA

SEQ ID NO: 784 - DNA, 76 bp, synthetic construct
  misc_feature 1..76: note = Description of sequence: 2'MOE-Modified TREMs
  source 1..76: mol_type = other DNA
  misc_feature 1..76: note = DNA/RNA hybrid molecule
  misc_feature 1..12: note = RNA
  misc_feature 13: note = DNA
  misc_feature 14..76: note = RNA
ggctccgtggcgdaatggatagcgcattggacttcaaattcaaaggttccgggttcgagtcccggcggagtcgcca

SEQ ID NO: 785 - DNA, 76 bp, synthetic construct; identical to SEQ ID NO: 775
  misc_feature 1..76: note = Description of sequence: 2'MOE-Modified TREMs
  source 1..76: mol_type = other DNA
  misc_feature 1..76: note = DNA/RNA hybrid molecule
  misc_feature 1..13: note = RNA
  misc_feature 14: note = DNA
  misc_feature 15..76: note = RNA

SEQ ID NO: 786 - DNA, 76 bp, synthetic construct; identical to SEQ ID NO: 775
  misc_feature 1..76: note = Description of sequence: 2'MOE-Modified TREMs
  source 1..76: mol_type = other DNA
  misc_feature 1..76: note = DNA/RNA hybrid molecule
  misc_feature 1..14: note = RNA
  misc_feature 15: note = DNA
  misc_feature 16..76: note = RNA

SEQ ID NO: 787 - DNA, 76 bp, synthetic construct; identical to SEQ ID NO: 775
  misc_feature 1..76: note = Description of sequence: 2'MOE-Modified TREMs
  source 1..76: mol_type = other DNA
  misc_feature 1..76: note = DNA/RNA hybrid molecule
  misc_feature 1..15: note = RNA
  misc_feature 16: note = DNA
  misc_feature 17..76: note = RNA

SEQ ID NO: 788 - DNA, 76 bp, synthetic construct; identical to SEQ ID NO: 775
  misc_feature 1..76: note = Description of sequence: 2'MOE-Modified TREMs
  source 1..76: mol_type = other DNA
  misc_feature 1..76: note = DNA/RNA hybrid molecule
  misc_feature 1..16: note = RNA
  misc_feature 17: note = DNA
  misc_feature 18..76: note = RNA

SEQ ID NO: 789 - DNA, 76 bp, synthetic construct; identical to SEQ ID NO: 775
  misc_feature 1..76: note = Description of sequence: 2'MOE-Modified TREMs
  source 1..76: mol_type = other DNA
  misc_feature 1..76: note = DNA/RNA hybrid molecule
  misc_feature 1..17: note = RNA
  misc_feature 18: note = DNA
  misc_feature 19..76: note = RNA

SEQ ID NO: 790 - DNA, 76 bp, synthetic construct; identical to SEQ ID NO: 775
  misc_feature 1..76: note = Description of sequence: 2'MOE-Modified TREMs
  source 1..76: mol_type = other DNA
  misc_feature 1..76: note = DNA/RNA hybrid molecule
  misc_feature 1..18: note = RNA
  misc_feature 19: note = DNA
  misc_feature 20..76: note = RNA

SEQ ID NO: 791 - DNA, 76 bp, synthetic construct; identical to SEQ ID NO: 775
  misc_feature 1..76: note = Description of sequence: 2'MOE-Modified TREMs
  source 1..76: mol_type = other DNA
  misc_feature 1..76: note = DNA/RNA hybrid molecule
  misc_feature 1..19: note = RNA
  misc_feature 20: note = DNA
  misc_feature 21..76: note = RNA

SEQ ID NO: 792 - DNA, 76 bp, synthetic construct; identical to SEQ ID NO: 775
  misc_feature 1..76: note = Description of sequence: 2'MOE-Modified TREMs
  source 1..76: mol_type = other DNA
  misc_feature 1..76: note = DNA/RNA hybrid molecule
  misc_feature 1..20: note = RNA
  misc_feature 21: note = DNA
  misc_feature 22..76: note = RNA

SEQ ID NO: 793 - DNA, 76 bp, synthetic construct; identical to SEQ ID NO: 775
  misc_feature 1..76: note = Description of sequence: 2'MOE-Modified TREMs
  source 1..76: mol_type = other DNA
  misc_feature 1..76: note = DNA/RNA hybrid molecule
  misc_feature 1..21: note = RNA
  misc_feature 22: note = DNA
  misc_feature 23..76: note = RNA

SEQ ID NO: 794 - DNA, 76 bp, synthetic construct
  misc_feature 1..76: note = Description of sequence: 2'MOE-Modified TREMs
  source 1..76: mol_type = other DNA
  misc_feature 1..76: note = DNA/RNA hybrid molecule
  misc_feature 1..22: note = RNA
  misc_feature 23: note = DNA
  misc_feature 24..76: note = RNA
ggctccgtggcgcaatggatagdgcattggacttcaaattcaaaggttccgggttcgagtcccggcggagtcgcca

SEQ ID NO: 795 - DNA, 76 bp, synthetic construct; identical to SEQ ID NO: 775
  misc_feature 1..76: note = Description of sequence: 2'MOE-Modified TREMs
  source 1..76: mol_type = other DNA
  misc_feature 1..76: note = DNA/RNA hybrid molecule
  misc_feature 1..23: note = RNA
  misc_feature 24: note = DNA
  misc_feature 25..76: note = RNA

SEQ ID NO: 796 - DNA, 76 bp, synthetic construct
  misc_feature 1..76: note = Description of sequence: 2'MOE-Modified TREMs
  source 1..76: mol_type = other DNA
  misc_feature 1..76: note = DNA/RNA hybrid molecule
  misc_feature 1..24: note = RNA
  misc_feature 25: note = DNA
  misc_feature 26..76: note = RNA
ggctccgtggcgcaatggatagcgdattggacttcaaattcaaaggttccgggttcgagtcccggcggagtcgcca

SEQ ID NO: 797 - DNA, 76 bp, synthetic construct; identical to SEQ ID NO: 775
  misc_feature 1..76: note = Description of sequence: 2'MOE-Modified TREMs
  source 1..76: mol_type = other DNA
  misc_feature 1..76: note = DNA/RNA hybrid molecule
  misc_feature 1..26: note = RNA
  misc_feature 27: note = DNA
  misc_feature 28..76: note = RNA

SEQ ID NO: 798 - DNA, 76 bp, synthetic construct; identical to SEQ ID NO: 775
  misc_feature 1..76: note = Description of sequence: 2'MOE-Modified TREMs
  source 1..76: mol_type = other DNA
  misc_feature 1..76: note = DNA/RNA hybrid molecule
  misc_feature 1..27: note = RNA
  misc_feature 28: note = DNA
  misc_feature 29..76: note = RNA

SEQ ID NO: 799 - DNA, 76 bp, synthetic construct; identical to SEQ ID NO: 775
  misc_feature 1..76: note = Description of sequence: 2'MOE-Modified TREMs
  source 1..76: mol_type = other DNA
  misc_feature 1..76: note = DNA/RNA hybrid molecule
  misc_feature 1..28: note = RNA
  misc_feature 29: note = DNA
  misc_feature 30..76: note = RNA

SEQ ID NO: 800 - DNA, 76 bp, synthetic construct; identical to SEQ ID NO: 775
  misc_feature 1..76: note = Description of sequence: 2'MOE-Modified TREMs
  source 1..76: mol_type = other DNA
  misc_feature 1..76: note = DNA/RNA hybrid molecule
  misc_feature 1..29: note = RNA
  misc_feature 30: note = DNA
  misc_feature 31..76: note = RNA

SEQ ID NO: 801 - DNA, 76 bp, synthetic construct
  misc_feature 1..76: note = Description of sequence: 2'MOE-Modified TREMs
  source 1..76: mol_type = other DNA
  misc_feature 1..76: note = DNA/RNA hybrid molecule
  misc_feature 1..31: note = RNA
  misc_feature 32: note = DNA
  misc_feature 33..76: note = RNA
ggctccgtggcgcaatggatagcgcattggadttcaaattcaaaggttccgggttcgagtcccggcggagtcgcca

SEQ ID NO: 802 - DNA, 76 bp, synthetic construct; identical to SEQ ID NO: 775
  misc_feature 1..76: note = Description of sequence: 2'MOE-Modified TREMs
  source 1..76: mol_type = other DNA
  misc_feature 1..76: note = DNA/RNA hybrid molecule
  misc_feature 1..32: note = RNA
  misc_feature 33: note = DNA
  misc_feature 34..76: note = RNA

SEQ ID NO: 803 - DNA, 76 bp, synthetic construct; identical to SEQ ID NO: 775
  misc_feature 1..76: note = Description of sequence: 2'MOE-Modified TREMs
  source 1..76: mol_type = other DNA
  misc_feature 1..76: note = DNA/RNA hybrid molecule
  misc_feature 1..33: note = RNA
  misc_feature 34: note = DNA
  misc_feature 35..76: note = RNA

SEQ ID NO: 804 - DNA, 76 bp, synthetic construct
  misc_feature 1..76: note = Description of sequence: 2'MOE-Modified TREMs
  source 1..76: mol_type = other DNA
  misc_feature 1..76: note = DNA/RNA hybrid molecule
  misc_feature 1..34: note = RNA
  misc_feature 35: note = DNA
  misc_feature 36..76: note = RNA
ggctccgtggcgcaatggatagcgcattggacttdaaattcaaaggttccgggttcgagtcccggcggagtcgcca

SEQ ID NO: 805 - DNA, 76 bp, synthetic construct; identical to SEQ ID NO: 775
  misc_feature 1..76: note = Description of sequence: 2'MOE-Modified TREMs
  source 1..76: mol_type = other DNA
  misc_feature 1..76: note = DNA/RNA hybrid molecule
  misc_feature 1..35: note = RNA
  misc_feature 36: note = DNA
  misc_feature 37..76: note = RNA

SEQ ID NO: 806 - DNA, 76 bp, synthetic construct; identical to SEQ ID NO: 775
  misc_feature 1..76: note = Description of sequence: 2'MOE-Modified TREMs
  source 1..76: mol_type = other DNA
  misc_feature 1..76: note = DNA/RNA hybrid molecule
  misc_feature 1..36: note = RNA
  misc_feature 37: note = DNA
  misc_feature 38..76: note = RNA

SEQ ID NO: 807 - DNA, 76 bp, synthetic construct; identical to SEQ ID NO: 775
  misc_feature 1..76: note = Description of sequence: 2'MOE-Modified TREMs
  source 1..76: mol_type = other DNA
  misc_feature 1..76: note = DNA/RNA hybrid molecule
  misc_feature 1..37: note = RNA
  misc_feature 38: note = DNA
  misc_feature 39..76: note = RNA

SEQ ID NO: 808 - DNA, 76 bp, synthetic construct
  misc_feature 1..76: note = Description of sequence: 2'MOE-Modified TREMs
  source 1..76: mol_type = other DNA
  misc_feature 1..76: note = DNA/RNA hybrid molecule
  misc_feature 1..40: note = RNA
  misc_feature 41: note = DNA
  misc_feature 42..76: note = RNA
ggctccgtggcgcaatggatagcgcattggacttcaaattdaaaggttccgggttcgagtcccggcggagtcgcca

SEQ ID NO: 809 - DNA, 76 bp, synthetic construct; identical to SEQ ID NO: 775
  misc_feature 1..76: note = Description of sequence: 2'MOE-Modified TREMs
  source 1..76: mol_type = other DNA
  misc_feature 1..76: note = DNA/RNA hybrid molecule
  misc_feature 1..41: note = RNA
  misc_feature 42: note = DNA
  misc_feature 43..76: note = RNA

SEQ ID NO: 810 - DNA, 76 bp, synthetic construct; identical to SEQ ID NO: 775
  misc_feature 1..76: note = Description of sequence: 2'MOE-Modified TREMs
  source 1..76: mol_type = other DNA
  misc_feature 1..76: note = DNA/RNA hybrid molecule
  misc_feature 1..42: note = RNA
  misc_feature 43: note = DNA
  misc_feature 44..76: note = RNA

SEQ ID NO: 811 - DNA, 76 bp, synthetic construct; identical to SEQ ID NO: 775
  misc_feature 1..76: note = Description of sequence: 2'MOE-Modified TREMs
  source 1..76: mol_type = other DNA
  misc_feature 1..76: note = DNA/RNA hybrid molecule
  misc_feature 1..43: note = RNA
  misc_feature 44: note = DNA
  misc_feature 45..76: note = RNA

SEQ ID NO: 812 - DNA, 76 bp, synthetic construct; identical to SEQ ID NO: 775
  misc_feature 1..76: note = Description of sequence: 2'MOE-Modified TREMs
  source 1..76: mol_type = other DNA
  misc_feature 1..76: note = DNA/RNA hybrid molecule
  misc_feature 1..44: note = RNA
  misc_feature 45: note = DNA
  misc_feature 46..76: note = RNA

SEQ ID NO: 813 - DNA, 76 bp, synthetic construct; identical to SEQ ID NO: 775
  misc_feature 1..76: note = Description of sequence: 2'MOE-Modified TREMs
  source 1..76: mol_type = other DNA
  misc_feature 1..76: note = DNA/RNA hybrid molecule
  misc_feature 1..45: note = RNA
  misc_feature 46: note = DNA
  misc_feature 47..76: note = RNA

SEQ ID NO: 814 - DNA, 76 bp, synthetic construct; identical to SEQ ID NO: 775
  misc_feature 1..76: note = Description of sequence: 2'MOE-Modified TREMs
  source 1..76: mol_type = other DNA
  misc_feature 1..76: note = DNA/RNA hybrid molecule
  misc_feature 1..46: note = RNA
  misc_feature 47: note = DNA
  misc_feature 48..76: note = RNA

SEQ ID NO: 815 - DNA, 76 bp, synthetic construct; identical to SEQ ID NO: 775
  misc_feature 1..76: note = Description of sequence: 2'MOE-Modified TREMs
  source 1..76: mol_type = other DNA
  misc_feature 1..76: note = DNA/RNA hybrid molecule
  misc_feature 1..47: note = RNA
  misc_feature 48: note = DNA
  misc_feature 49..76: note = RNA

SEQ ID NO: 816 - DNA, 76 bp, synthetic construct
  misc_feature 1..76: note = Description of sequence: 2'MOE-Modified TREMs
  source 1..76: mol_type = other DNA
  misc_feature 1..76: note = DNA/RNA hybrid molecule
  misc_feature 1..48: note = RNA
  misc_feature 49: note = DNA
  misc_feature 50..76: note = RNA
ggctccgtggcgcaatggatagcgcattggacttcaaattcaaaggttdcgggttcgagtcccggcggagtcgcca

SEQ ID NO: 817 - DNA, 76 bp, synthetic construct
  misc_feature 1..76: note = Description of sequence: 2'MOE-Modified TREMs
  source 1..76: mol_type = other DNA
  misc_feature 1..76: note = DNA/RNA hybrid molecule
  misc_feature 1..49: note = RNA
  misc_feature 50: note = DNA
  misc_feature 51..76: note = RNA
ggctccgtggcgcaatggatagcgcattggacttcaaattcaaaggttcdgggttcgagtcccggcggagtcgcca

SEQ ID NO: 818 - DNA, 76 bp, synthetic construct; identical to SEQ ID NO: 775
  misc_feature 1..76: note = Description of sequence: 2'MOE-Modified TREMs
  source 1..76: mol_type = other DNA
  misc_feature 1..76: note = DNA/RNA hybrid molecule
  misc_feature 1..50: note = RNA
  misc_feature 51: note = DNA
  misc_feature 52..76: note = RNA

SEQ ID NO: 819 - DNA, 76 bp, synthetic construct; identical to SEQ ID NO: 775
  misc_feature 1..76: note = Description of sequence: 2'MOE-Modified TREMs
  source 1..76: mol_type = other DNA
  misc_feature 1..76: note = DNA/RNA hybrid molecule
  misc_feature 1..51: note = RNA
  misc_feature 52: note = DNA
  misc_feature 53..76: note = RNA

SEQ ID NO: 820 - DNA, 76 bp, synthetic construct; identical to SEQ ID NO: 775
  misc_feature 1..76: note = Description of sequence: 2'MOE-Modified TREMs
  source 1..76: mol_type = other DNA
  misc_feature 1..76: note = DNA/RNA hybrid molecule
  misc_feature 1..52: note = RNA
  misc_feature 53: note = DNA
  misc_feature 54..76: note = RNA

SEQ ID NO: 821 - DNA, 76 bp, synthetic construct; identical to SEQ ID NO: 775
  misc_feature 1..76: note = Description of sequence: 2'MOE-Modified TREMs
  source 1..76: mol_type = other DNA
  misc_feature 1..76: note = DNA/RNA hybrid molecule
  misc_feature 1..53: note = RNA
  misc_feature 54: note = DNA
  misc_feature 55..76: note = RNA

SEQ ID NO: 822 - DNA, 76 bp, synthetic construct; identical to SEQ ID NO: 775
  misc_feature 1..76: note = Description of sequence: 2'MOE-Modified TREMs
  source 1..76: mol_type = other DNA
  misc_feature 1..76: note = DNA/RNA hybrid molecule
  misc_feature 1..54: note = RNA
  misc_feature 55: note = DNA
  misc_feature 56..76: note = RNA

SEQ ID NO: 823 - DNA, 76 bp, synthetic construct
  misc_feature 1..76: note = Description of sequence: 2'MOE-Modified TREMs
  source 1..76: mol_type = other DNA
  misc_feature 1..76: note = DNA/RNA hybrid molecule
  misc_feature 1..55: note = RNA
  misc_feature 56: note = DNA
  misc_feature 57..76: note = RNA
ggctccgtggcgcaatggatagcgcattggacttcaaattcaaaggttccgggttdgagtcccggcggagtcgcca

SEQ ID NO: 824 - DNA, 76 bp, synthetic construct; identical to SEQ ID NO: 775
  misc_feature 1..76: note = Description of sequence: 2'MOE-Modified TREMs
  source 1..76: mol_type = other DNA
  misc_feature 1..76: note = DNA/RNA hybrid molecule
  misc_feature 1..56: note = RNA
  misc_feature 57: note = DNA
  misc_feature 58..76: note = RNA

SEQ ID NO: 825 - DNA, 76 bp, synthetic construct; identical to SEQ ID NO: 775
  misc_feature 1..76: note = Description of sequence: 2'MOE-Modified TREMs
  source 1..76: mol_type = other DNA
  misc_feature 1..76: note = DNA/RNA hybrid molecule
  misc_feature 1..57: note = RNA
  misc_feature 58: note = DNA
  misc_feature 59..76: note = RNA

SEQ ID NO: 826 - DNA, 76 bp, synthetic construct; identical to SEQ ID NO: 775
  misc_feature 1..76: note = Description of sequence: 2'MOE-Modified TREMs
  source 1..76: mol_type = other DNA
  misc_feature 1..76: note = DNA/RNA hybrid molecule
  misc_feature 1..58: note = RNA
  misc_feature 59: note = DNA
  misc_feature 60..76: note = RNA

SEQ ID NO: 827 - DNA, 76 bp, synthetic construct; identical to SEQ ID NO: 775
  misc_feature 1..76: note = Description of sequence: 2'MOE-Modified TREMs
  source 1..76: mol_type = other DNA
  misc_feature 1..76: note = DNA/RNA hybrid molecule
  misc_feature 1..59: note = RNA
  misc_feature 60: note = DNA
  misc_feature 61..76: note = RNA

SEQ ID NO: 828 - DNA, 76 bp, synthetic construct
  misc_feature 1..76: note = Description of sequence: 2'MOE-Modified TREMs
  source 1..76: mol_type = other DNA
  misc_feature 1..76: note = DNA/RNA hybrid molecule
  misc_feature 1..60: note = RNA
  misc_feature 61: note = DNA
  misc_feature 62..76: note = RNA
ggctccgtggcgcaatggatagcgcattggacttcaaattcaaaggttccgggttcgagtdccggcggagtcgcca

SEQ ID NO: 829 - DNA, 76 bp, synthetic construct
  misc_feature 1..76: note = Description of sequence: 2'MOE-Modified TREMs
  source 1..76: mol_type = other DNA
  misc_feature 1..76: note = DNA/RNA hybrid molecule
  misc_feature 1..61: note = RNA
  misc_feature 62: note = DNA
  misc_feature 63..76: note = RNA
ggctccgtggcgcaatggatagcgcattggacttcaaattcaaaggttccgggttcgagtcdcggcggagtcgcca

SEQ ID NO: 830 - DNA, 76 bp, synthetic construct; identical to SEQ ID NO: 775
  misc_feature 1..76: note = Description of sequence: 2'MOE-Modified TREMs
  source 1..76: mol_type = other DNA
  misc_feature 1..76: note = DNA/RNA hybrid molecule
  misc_feature 1..63: note = RNA
  misc_feature 64: note = DNA
  misc_feature 65..76: note = RNA

SEQ ID NO: 831 - DNA, 76 bp, synthetic construct; identical to SEQ ID NO: 775
  misc_feature 1..76: note = Description of sequence: 2'MOE-Modified TREMs
  source 1..76: mol_type = other DNA
  misc_feature 1..76: note = DNA/RNA hybrid molecule
  misc_feature 1..64: note = RNA
  misc_feature 65: note = DNA
  misc_feature 66..76: note = RNA

SEQ ID NO: 832 - DNA, 76 bp, synthetic construct
  misc_feature 1..76: note = Description of sequence: 2'MOE-Modified TREMs
  source 1..76: mol_type = other DNA
  misc_feature 1..76: note = DNA/RNA hybrid molecule
  misc_feature 1..65: note = RNA
  misc_feature 66: note = DNA
  misc_feature 67..76: note = RNA
ggctccgtggcgcaatggatagcgcattggacttcaaattcaaaggttccgggttcgagtcccggdggagtcgcca

SEQ ID NO: 833 - DNA, 76 bp, synthetic construct; identical to SEQ ID NO: 775
  misc_feature 1..76: note = Description of sequence: 2'MOE-Modified TREMs
  source 1..76: mol_type = other DNA
  misc_feature 1..76: note = DNA/RNA hybrid molecule
  misc_feature 1..66: note = RNA
  misc_feature 67: note = DNA
  misc_feature 68..76: note = RNA

SEQ ID NO: 834 - DNA, 76 bp, synthetic construct; identical to SEQ ID NO: 775
  misc_feature 1..76: note = Description of sequence: 2'MOE-Modified TREMs
  source 1..76: mol_type = other DNA
  misc_feature 1..76: note = DNA/RNA hybrid molecule
  misc_feature 1..67: note = RNA
  misc_feature 68: note = DNA
  misc_feature 69..76: note = RNA

SEQ ID NO: 835 - DNA, 76 bp, synthetic construct; identical to SEQ ID NO: 775
  misc_feature 1..76: note = Description of sequence: 2'MOE-Modified TREMs
  source 1..76: mol_type = other DNA
  misc_feature 1..76: note = DNA/RNA hybrid molecule
  misc_feature 1..68: note = RNA
  misc_feature 69: note = DNA
  misc_feature 70..76: note = RNA

SEQ ID NO: 836 - DNA, 76 bp, synthetic construct; identical to SEQ ID NO: 775
  misc_feature 1..76: note = Description of sequence: 2'MOE-Modified TREMs
  source 1..76: mol_type = other DNA
  misc_feature 1..76: note = DNA/RNA hybrid molecule
  misc_feature 1..70: note = RNA
  misc_feature 71: note = DNA
  misc_feature 72..76: note = RNA

SEQ ID NO: 837 - DNA, 76 bp, synthetic construct
  misc_feature 1..76: note = Description of sequence: 2'MOE-Modified TREMs
  source 1..76: mol_type = other DNA
  misc_feature 1..76: note = DNA/RNA hybrid molecule
  misc_feature 1..71: note = RNA
  misc_feature 72: note = DNA
  misc_feature 73..76: note = RNA
ggctccgtggcgcaatggatagcgcattggacttcaaattcaaaggttccgggttcgagtcccggcggagtdgcca

SEQ ID NO: 838 - DNA, 76 bp, synthetic construct; identical to SEQ ID NO: 775
  misc_feature 1..76: note = Description of sequence: 2'MOE-Modified TREMs
  source 1..76: mol_type = other DNA
  misc_feature 1..76: note = DNA/RNA hybrid molecule
  misc_feature 1..72: note = RNA
  misc_feature 73: note = DNA
  misc_feature 74..76: note = RNA

SEQ ID NO: 839 - DNA, 76 bp, synthetic construct
  misc_feature 1..76: note = Description of sequence: 2'MOE-Modified TREMs
  source 1..76: mol_type = other DNA
  misc_feature 1..76: note = DNA/RNA hybrid molecule
  misc_feature 1..73: note = RNA
  misc_feature 74: note = DNA
  misc_feature 75..76: note = RNA
ggctccgtggcgcaatggatagcgcattggacttcaaattcaaaggttccgggttcgagtcccggcggagtcgdca

SEQ ID NO: 840 - DNA, 76 bp, synthetic construct
  misc_feature 1..76: note = Description of sequence: 2'MOE-Modified TREMs
  source 1..76: mol_type = other DNA
  misc_feature 1..76: note = DNA/RNA hybrid molecule
  misc_feature 1..74: note = RNA
  misc_feature 75: note = DNA
  misc_feature 76: note = RNA
ggctccgtggcgcaatggatagcgcattggacttcaaattcaaaggttccgggttcgagtcccggcggagtcgcda

SEQ ID NO: 841 - DNA, 76 bp, synthetic construct; identical to SEQ ID NO: 775
  misc_feature 1..76: note = Description of sequence: 2'MOE-Modified TREMs
  source 1..76: mol_type = other DNA
  misc_feature 1..76: note = DNA/RNA hybrid molecule
  misc_feature 1..75: note = RNA
  misc_feature 76: note = DNA

SEQ ID NO: 842 - DNA, 76 bp, synthetic construct; identical to SEQ ID NO: 775
  misc_feature 1..76: note = Description of sequence: 2'-Deoxy-Modified TREMs
  source 1..76: mol_type = other DNA
  misc_feature 1..76: note = DNA/RNA hybrid molecule
  misc_feature 1: note = DNA
  misc_feature 2..76: note = RNA

SEQ ID NO: 843 - DNA, 76 bp, synthetic construct; identical to SEQ ID NO: 775
  misc_feature 1..76: note = Description of sequence: 2'-Deoxy-Modified TREMs
  source 1..76: mol_type = other DNA
  misc_feature 1..76: note = DNA/RNA hybrid molecule
  misc_feature 1: note = RNA
  misc_feature 2: note = DNA
  misc_feature 3..76: note = RNA

SEQ ID NO: 844 - DNA, 76 bp, synthetic construct; identical to SEQ ID NO: 775
  misc_feature 1..76: note = Description of sequence: 2'-Deoxy-Modified TREMs
  source 1..76: mol_type = other DNA
  misc_feature 1..76: note = DNA/RNA hybrid molecule
  misc_feature 1..2: note = RNA
  misc_feature 3: note = DNA
  misc_feature 4..76: note = RNA

SEQ ID NO: 845 - DNA, 76 bp, synthetic construct; identical to SEQ ID NO: 775
  misc_feature 1..76: note = Description of sequence: 2'-Deoxy-Modified TREMs
  source 1..76: mol_type = other DNA
  misc_feature 1..76: note = DNA/RNA hybrid molecule
  misc_feature 1..3: note = RNA
  misc_feature 4: note = DNA
  misc_feature 5..76: note = RNA

SEQ ID NO: 846 - DNA, 76 bp, synthetic construct; identical to SEQ ID NO: 775
  misc_feature 1..76: note = Description of sequence: 2'-Deoxy-Modified TREMs
  source 1..76: mol_type = other DNA
  misc_feature 1..76: note = DNA/RNA hybrid molecule
  misc_feature 1..4: note = RNA
  misc_feature 5: note = DNA
  misc_feature 6..76: note = RNA

SEQ ID NO: 847 - DNA, 76 bp, synthetic construct; identical to SEQ ID NO: 775
  misc_feature 1..76: note = Description of sequence: 2'-Deoxy-Modified TREMs
  source 1..76: mol_type = other DNA
  misc_feature 1..76: note = DNA/RNA hybrid molecule
  misc_feature 1..5: note = RNA
  misc_feature 6: note = DNA
  misc_feature 7..76: note = RNA

SEQ ID NO: 848 - DNA, 76 bp, synthetic construct; identical to SEQ ID NO: 775
  misc_feature 1..76: note = Description of sequence: 2'-Deoxy-Modified TREMs
  source 1..76: mol_type = other DNA
  misc_feature 1..76: note = DNA/RNA hybrid molecule
  misc_feature 1..6: note = RNA
  misc_feature 7: note = DNA
  misc_feature 8..76: note = RNA

SEQ ID NO: 849 - DNA, 76 bp, synthetic construct; identical to SEQ ID NO: 775
  misc_feature 1..76: note = Description of sequence: 2'-Deoxy-Modified TREMs
  source 1..76: mol_type = other DNA
  misc_feature 1..76: note = DNA/RNA hybrid molecule
  misc_feature 1..7: note = RNA
  misc_feature 8: note = DNA
  misc_feature 9..76: note = RNA

SEQ ID NO: 850 - DNA, 76 bp, synthetic construct; identical to SEQ ID NO: 775
  misc_feature 1..76: note = Description of sequence: 2'-Deoxy-Modified TREMs
  source 1..76: mol_type = other DNA
  misc_feature 1..76: note = DNA/RNA hybrid molecule
  misc_feature 1..8: note = RNA
  misc_feature 9: note = DNA
  misc_feature 10..76: note = RNA

SEQ ID NO: 851 - DNA, 76 bp, synthetic construct; identical to SEQ ID NO: 775
  misc_feature 1..76: note = Description of sequence: 2'-Deoxy-Modified TREMs
  source 1..76: mol_type = other DNA
  misc_feature 1..76: note = DNA/RNA hybrid molecule
  misc_feature 1..9: note = RNA
  misc_feature 10: note = DNA
  misc_feature 11..76: note = RNA

SEQ ID NO: 852 - DNA, 76 bp, synthetic construct; identical to SEQ ID NO: 775
  misc_feature 1..76: note = Description of sequence: 2'-Deoxy-Modified TREMs
  source 1..76: mol_type = other DNA
  misc_feature 1..76: note = DNA/RNA hybrid molecule
  misc_feature 1..10: note = RNA
  misc_feature 11: note = DNA
  misc_feature 12..76: note = RNA

SEQ ID NO: 853 - DNA, 76 bp, synthetic construct; identical to SEQ ID NO: 775
  misc_feature 1..76: note = Description of sequence: 2'-Deoxy-Modified TREMs
  source 1..76: mol_type = other DNA
  misc_feature 1..76: note = DNA/RNA hybrid molecule
  misc_feature 1..11: note = RNA
  misc_feature 12: note = DNA
  misc_feature 13..76: note = RNA

SEQ ID NO: 854 - DNA, 76 bp, synthetic construct; identical to SEQ ID NO: 775
  misc_feature 1..76: note = Description of sequence: 2'-Deoxy-Modified TREMs
  source 1..76: mol_type = other DNA
  misc_feature 1..76: note = DNA/RNA hybrid molecule
  misc_feature 1..12: note = RNA
  misc_feature 13: note = DNA
  misc_feature 14..76: note = RNA

SEQ ID NO: 855 - DNA, 76 bp, synthetic construct; identical to SEQ ID NO: 775
  misc_feature 1..76: note = Description of sequence: 2'-Deoxy-Modified TREMs
  source 1..76: mol_type = other DNA
  misc_feature 1..76: note = DNA/RNA hybrid molecule
  misc_feature 1..13: note = RNA
  misc_feature 14: note = DNA
  misc_feature 15..76: note = RNA

SEQ ID NO: 856 - DNA, 76 bp, synthetic construct; identical to SEQ ID NO: 775
  misc_feature 1..76: note = Description of sequence: 2'-Deoxy-Modified TREMs
  source 1..76: mol_type = other DNA
  misc_feature 1..76: note = DNA/RNA hybrid molecule
  misc_feature 1..14: note = RNA
  misc_feature 15: note = DNA
  misc_feature 16..76: note = RNA

SEQ ID NO: 857 - DNA, 76 bp, synthetic construct; identical to SEQ ID NO: 775
  misc_feature 1..76: note = Description of sequence: 2'-Deoxy-Modified TREMs
  source 1..76: mol_type = other DNA
  misc_feature 1..76: note = DNA/RNA hybrid molecule
  misc_feature 1..15: note = RNA
  misc_feature 16: note = DNA
  misc_feature 17..76: note = RNA

SEQ ID NO: 858 - DNA, 76 bp, synthetic construct; identical to SEQ ID NO: 775
  misc_feature 1..76: note = Description of sequence: 2'-Deoxy-Modified TREMs
  source 1..76: mol_type = other DNA
  misc_feature 1..76: note = DNA/RNA hybrid molecule
  misc_feature 1..16: note = RNA
  misc_feature 17: note = DNA
  misc_feature 18..76: note = RNA

SEQ ID NO: 859 - DNA, 76 bp, synthetic construct; identical to SEQ ID NO: 775
  misc_feature 1..76: note = Description of sequence: 2'-Deoxy-Modified TREMs
  source 1..76: mol_type = other DNA
  misc_feature 1..76: note = DNA/RNA hybrid molecule
  misc_feature 1..17: note = RNA
  misc_feature 18: note = DNA
  misc_feature 19..76: note = RNA

SEQ ID NO: 860 - DNA, 76 bp, synthetic construct; identical to SEQ ID NO: 775
  misc_feature 1..76: note = Description of sequence: 2'-Deoxy-Modified TREMs
  source 1..76: mol_type = other DNA
  misc_feature 1..76: note = DNA/RNA hybrid molecule
  misc_feature 1..18: note = RNA
  misc_feature 19: note = DNA
  misc_feature 20..76: note = RNA

SEQ ID NO: 861 - DNA, 76 bp, synthetic construct; identical to SEQ ID NO: 775
  misc_feature 1..76: note = Description of sequence: 2'-Deoxy-Modified TREMs
  source 1..76: mol_type = other DNA
  misc_feature 1..76: note = DNA/RNA hybrid molecule
  misc_feature 1..19: note = RNA
  misc_feature 20: note = DNA
  misc_feature 21..76: note = RNA

SEQ ID NO: 862 - DNA, 76 bp, synthetic construct; identical to SEQ ID NO: 775
  misc_feature 1..76: note = Description of sequence: 2'-Deoxy-Modified TREMs
  source 1..76: mol_type = other DNA
  misc_feature 1..76: note = DNA/RNA hybrid molecule
  misc_feature 1..20: note = RNA
  misc_feature 21: note = DNA
  misc_feature 22..76: note = RNA

SEQ ID NO: 863 - DNA, 76 bp, synthetic construct; identical to SEQ ID NO: 775
  misc_feature 1..76: note = Description of sequence: 2'-Deoxy-Modified TREMs
  source 1..76: mol_type = other DNA
  misc_feature 1..76: note = DNA/RNA hybrid molecule
  misc_feature 1..21: note = RNA
  misc_feature 22: note = DNA
  misc_feature 23..76: note = RNA

SEQ ID NO: 864 - DNA, 76 bp, synthetic construct; identical to SEQ ID NO: 775
  misc_feature 1..76: note = Description of sequence: 2'-Deoxy-Modified TREMs
  source 1..76: mol_type = other DNA
  misc_feature 1..76: note = DNA/RNA hybrid molecule
  misc_feature 1..22: note = RNA
  misc_feature 23: note = DNA
  misc_feature 24..76: note = RNA

SEQ ID NO: 865 - DNA, 76 bp, synthetic construct; identical to SEQ ID NO: 775
  misc_feature 1..76: note = Description of sequence: 2'-Deoxy-Modified TREMs
  source 1..76: mol_type = other DNA
  misc_feature 1..76: note = DNA/RNA hybrid molecule
  misc_feature 1..23: note = RNA
  misc_feature 24: note = DNA
  misc_feature 25..76: note = RNA

SEQ ID NO: 866 - DNA, 76 bp, synthetic construct; identical to SEQ ID NO: 775
  misc_feature 1..76: note = Description of sequence: 2'-Deoxy-Modified TREMs
  source 1..76: mol_type = other DNA
  misc_feature 1..76: note = DNA/RNA hybrid molecule
  misc_feature 1..24: note = RNA
  misc_feature 25: note = DNA
  misc_feature 26..76: note = RNA

SEQ ID NO: 867 - DNA, 76 bp, synthetic construct; identical to SEQ ID NO: 775
  misc_feature 1..76: note = Description of sequence: 2'-Deoxy-Modified TREMs
  source 1..76: mol_type = other DNA
  misc_feature 1..76: note = DNA/RNA hybrid molecule
  misc_feature 1..25: note = RNA
  misc_feature 26: note = DNA
  misc_feature 27..76: note = RNA

SEQ ID NO: 868 - DNA, 76 bp, synthetic construct; identical to SEQ ID NO: 775
  misc_feature 1..76: note = Description of sequence: 2'-Deoxy-Modified TREMs
  source 1..76: mol_type = other DNA
  misc_feature 1..76: note = DNA/RNA hybrid molecule
  misc_feature 1..26: note = RNA
  misc_feature 27: note = DNA
  misc_feature 28..76: note = RNA

SEQ ID NO: 869 - DNA, 76 bp, synthetic construct; identical to SEQ ID NO: 775
  misc_feature 1..76: note = Description of sequence: 2'-Deoxy-Modified TREMs
  source 1..76: mol_type = other DNA
  misc_feature 1..76: note = DNA/RNA hybrid molecule
  misc_feature 1..27: note = RNA
  misc_feature 28: note = DNA
  misc_feature 29..76: note = RNA

SEQ ID NO: 870 - DNA, 76 bp, synthetic construct; identical to SEQ ID NO: 775
  misc_feature 1..76: note = Description of sequence: 2'-Deoxy-Modified TREMs
  source 1..76: mol_type = other DNA
  misc_feature 1..76: note = DNA/RNA hybrid molecule
  misc_feature 1..28: note = RNA
  misc_feature 29: note = DNA
  misc_feature 30..76: note = RNA

SEQ ID NO: 871 - DNA, 76 bp, synthetic construct; identical to SEQ ID NO: 775
  misc_feature 1..76: note = Description of sequence: 2'-Deoxy-Modified TREMs
  source 1..76: mol_type = other DNA
  misc_feature 1..76: note = DNA/RNA hybrid molecule
  misc_feature 1..29: note = RNA
  misc_feature 30: note = DNA
  misc_feature 31..76: note = RNA

SEQ ID NO: 872 - DNA, 76 bp, synthetic construct; identical to SEQ ID NO: 775
  misc_feature 1..76: note = Description of sequence: 2'-Deoxy-Modified TREMs
  source 1..76: mol_type = other DNA
  misc_feature 1..76: note = DNA/RNA hybrid molecule
  misc_feature 1..30: note = RNA
  misc_feature 31: note = DNA
  misc_feature 32..76: note = RNA

SEQ ID NO: 873 - DNA, 76 bp, synthetic construct; identical to SEQ ID NO: 775
  misc_feature 1..76: note = Description of sequence: 2'-Deoxy-Modified TREMs
  source 1..76: mol_type = other DNA
  misc_feature 1..76: note = DNA/RNA hybrid molecule
  misc_feature 1..31: note = RNA
  misc_feature 32: note = DNA
  misc_feature 33..76: note = RNA

SEQ ID NO: 874 - DNA, 76 bp, synthetic construct; identical to SEQ ID NO: 775
  misc_feature 1..76: note = Description of sequence: 2'-Deoxy-Modified TREMs
  source 1..76: mol_type = other DNA
  misc_feature 1..76: note = DNA/RNA hybrid molecule
  misc_feature 1..32: note = RNA
  misc_feature 33: note = DNA
  misc_feature 34..76: note = RNA

SEQ ID NO: 875 - DNA, 76 bp, synthetic construct; identical to SEQ ID NO: 775
  misc_feature 1..76: note = Description of sequence: 2'-Deoxy-Modified TREMs
  source 1..76: mol_type = other DNA
  misc_feature 1..76: note = DNA/RNA hybrid molecule
  misc_feature 1..33: note = RNA
  misc_feature 34: note = DNA
  misc_feature 35..76: note = RNA

SEQ ID NO: 876 - DNA, 76 bp, synthetic construct; identical to SEQ ID NO: 775
  misc_feature 1..76: note = Description of sequence: 2'-Deoxy-Modified TREMs
  source 1..76: mol_type = other DNA
  misc_feature 1..76: note = DNA/RNA hybrid molecule
  misc_feature 1..34: note = RNA
  misc_feature 35: note = DNA
  misc_feature 36..76: note = RNA

SEQ ID NO: 877 - DNA, 76 bp, synthetic construct; identical to SEQ ID NO: 775
  misc_feature 1..76: note = Description of sequence: 2'-Deoxy-Modified TREMs
  source 1..76: mol_type = other DNA
  misc_feature 1..76: note = DNA/RNA hybrid molecule
  misc_feature 1..35: note = RNA
  misc_feature 36: note = DNA
  misc_feature 37..76: note = RNA

SEQ ID NO: 878 - DNA, 76 bp, synthetic construct; identical to SEQ ID NO: 775
  misc_feature 1..76: note = Description of sequence: 2'-Deoxy-Modified TREMs
  source 1..76: mol_type = other DNA
  misc_feature 1..76: note = DNA/RNA hybrid molecule
  misc_feature 1..36: note = RNA
  misc_feature 37: note = DNA
  misc_feature 38..76: note = RNA

SEQ ID NO: 879 - DNA, 76 bp, synthetic construct; identical to SEQ ID NO: 775
  misc_feature 1..76: note = Description of sequence: 2'-Deoxy-Modified TREMs
  source 1..76: mol_type = other DNA
  misc_feature 1..76: note = DNA/RNA hybrid molecule
  misc_feature 1..37: note = RNA
  misc_feature 38: note = DNA
  misc_feature 39..76: note = RNA

SEQ ID NO: 880 - DNA, 76 bp, synthetic construct; identical to SEQ ID NO: 775
  misc_feature 1..76: note = Description of sequence: 2'-Deoxy-Modified TREMs
  source 1..76: mol_type = other DNA
  misc_feature 1..76: note = DNA/RNA hybrid molecule
  misc_feature 1..38: note = RNA
  misc_feature 39: note = DNA
  misc_feature 40..76: note = RNA

SEQ ID NO: 881 - DNA, 76 bp, synthetic construct; identical to SEQ ID NO: 775
  misc_feature 1..76: note = Description of sequence: 2'-Deoxy-Modified TREMs
  source 1..76: mol_type = other DNA
  misc_feature 1..76: note = DNA/RNA hybrid molecule
  misc_feature 1..39: note = RNA
  misc_feature 40: note = DNA
  misc_feature 41..76: note = RNA

SEQ ID NO: 882 - DNA, 76 bp, synthetic construct; identical to SEQ ID NO: 775
  misc_feature 1..76: note = Description of sequence: 2'-Deoxy-Modified TREMs
  source 1..76: mol_type = other DNA
  misc_feature 1..76: note = DNA/RNA hybrid molecule
  misc_feature 1..40: note = RNA
  misc_feature 41: note = DNA
  misc_feature 42..76: note = RNA

SEQ ID NO: 883 - DNA, 76 bp, synthetic construct; identical to SEQ ID NO: 775
  misc_feature 1..76: note = Description of sequence: 2'-Deoxy-Modified TREMs
  source 1..76: mol_type = other DNA
  misc_feature 1..76: note = DNA/RNA hybrid molecule
  misc_feature 1..41: note = RNA
  misc_feature 42: note = DNA
  misc_feature 43..76: note = RNA

SEQ ID NO: 884 - DNA, 76 bp, synthetic construct; identical to SEQ ID NO: 775
  misc_feature 1..76: note = Description of sequence: 2'-Deoxy-Modified TREMs
  source 1..76: mol_type = other DNA
  misc_feature 1..76: note = DNA/RNA hybrid molecule
  misc_feature 1..42: note = RNA
  misc_feature 43: note = DNA
  misc_feature 44..76: note = RNA

SEQ ID NO: 885 - DNA, 76 bp, synthetic construct; identical to SEQ ID NO: 775
  misc_feature 1..76: note = Description of sequence: 2'-Deoxy-Modified TREMs
  source 1..76: mol_type = other DNA
  misc_feature 1..76: note = DNA/RNA hybrid molecule
  misc_feature 1..43: note = RNA
  misc_feature 44: note = DNA
  misc_feature 45..76: note = RNA

SEQ ID NO: 886 - DNA, 76 bp, synthetic construct; identical to SEQ ID NO: 775
  misc_feature 1..76: note = Description of sequence: 2'-Deoxy-Modified TREMs
  source 1..76: mol_type = other DNA
  misc_feature 1..76: note = DNA/RNA hybrid molecule
  misc_feature 1..44: note = RNA
  misc_feature 45: note = DNA
  misc_feature 46..76: note = RNA

SEQ ID NO: 887 - DNA, 76 bp, synthetic construct; identical to SEQ ID NO: 775
  misc_feature 1..76: note = Description of sequence: 2'-Deoxy-Modified TREMs
  source 1..76: mol_type = other DNA
  misc_feature 1..76: note = DNA/RNA hybrid molecule
  misc_feature 1..45: note = RNA
  misc_feature 46: note = DNA
  misc_feature 47..76: note = RNA

SEQ ID NO: 888 - DNA, 76 bp, synthetic construct; identical to SEQ ID NO: 775
  misc_feature 1..76: note = Description of sequence: 2'-Deoxy-Modified TREMs
  source 1..76: mol_type = other DNA
  misc_feature 1..76: note = DNA/RNA hybrid molecule
  misc_feature 1..46: note = RNA
  misc_feature 47: note = DNA
  misc_feature 48..76: note = RNA

SEQ ID NO: 889 - DNA, 76 bp, synthetic construct; identical to SEQ ID NO: 775
  misc_feature 1..76: note = Description of sequence: 2'-Deoxy-Modified TREMs
  source 1..76: mol_type = other DNA
  misc_feature 1..76: note = DNA/RNA hybrid molecule
  misc_feature 1..47: note = RNA
  misc_feature 48: note = DNA
  misc_feature 49..76: note = RNA

SEQ ID NO: 890 - DNA, 76 bp, synthetic construct; identical to SEQ ID NO: 775
  misc_feature 1..76: note = Description of sequence: 2'-Deoxy-Modified TREMs
  source 1..76: mol_type = other DNA
  misc_feature 1..76: note = DNA/RNA hybrid molecule
  misc_feature 1..48: note = RNA
  misc_feature 49: note = DNA
  misc_feature 50..76: note = RNA

SEQ ID NO: 891 - DNA, 76 bp, synthetic construct; identical to SEQ ID NO: 775
  misc_feature 1..76: note = Description of sequence: 2'-Deoxy-Modified TREMs
  source 1..76: mol_type = other DNA
  misc_feature 1..76: note = DNA/RNA hybrid molecule
  misc_feature 1..49: note = RNA
  misc_feature 50: note = DNA
  misc_feature 51..76: note = RNA

SEQ ID NO: 892 - DNA, 76 bp, synthetic construct; identical to SEQ ID NO: 775
  misc_feature 1..76: note = Description of sequence: 2'-Deoxy-Modified TREMs
  source 1..76: mol_type = other DNA
  misc_feature 1..76: note = DNA/RNA hybrid molecule
  misc_feature 1..50: note = RNA
  misc_feature 51: note = DNA
  misc_feature 52..76: note = RNA

SEQ ID NO: 893 - DNA, 76 bp, synthetic construct; identical to SEQ ID NO: 775
  misc_feature 1..76: note = Description of sequence: 2'-Deoxy-Modified TREMs
  source 1..76: mol_type = other DNA
  misc_feature 1..76: note = DNA/RNA hybrid molecule
  misc_feature 1..51: note = RNA
  misc_feature 52: note = DNA
  misc_feature 53..76: note = RNA

SEQ ID NO: 894 - DNA, 76 bp, synthetic construct; identical to SEQ ID NO: 775
  misc_feature 1..76: note = Description of sequence: 2'-Deoxy-Modified TREMs
  source 1..76: mol_type = other DNA
  misc_feature 1..76: note = DNA/RNA hybrid molecule
  misc_feature 1..52: note = RNA
  misc_feature 53: note = DNA
  misc_feature 54..76: note = RNA

SEQ ID NO: 895 - DNA, 76 bp, synthetic construct; identical to SEQ ID NO: 775
  misc_feature 1..76: note = Description of sequence: 2'-Deoxy-Modified TREMs
  source 1..76: mol_type = other DNA
  misc_feature 1..76: note = DNA/RNA hybrid molecule
  misc_feature 1..53: note = RNA
  misc_feature 54: note = DNA
  misc_feature 55..76: note = RNA

SEQ ID NO: 896 - DNA, 76 bp, synthetic construct; identical to SEQ ID NO: 775
  misc_feature 1..76: note = Description of sequence: 2'-Deoxy-Modified TREMs
  source 1..76: mol_type = other DNA
  misc_feature 1..76: note = DNA/RNA hybrid molecule
  misc_feature 1..54: note = RNA
  misc_feature 55: note = DNA
  misc_feature 56..76: note = RNA

SEQ ID NO: 897 - DNA, 76 bp, synthetic construct; identical to SEQ ID NO: 775
  misc_feature 1..76: note = Description of sequence: 2'-Deoxy-Modified TREMs
  source 1..76: mol_type = other DNA
  misc_feature 1..76: note = DNA/RNA hybrid molecule
  misc_feature 1..55: note = RNA
  misc_feature 56: note = DNA
  misc_feature 57..76: note = RNA

SEQ ID NO: 898 - DNA, 76 bp, synthetic construct; identical to SEQ ID NO: 775
  misc_feature 1..76: note = Description of sequence: 2'-Deoxy-Modified TREMs
  source 1..76: mol_type = other DNA
  misc_feature 1..76: note = DNA/RNA hybrid molecule
  misc_feature 1..56: note = RNA
  misc_feature 57: note = DNA
  misc_feature 58..76: note = RNA

SEQ ID NO: 899 - DNA, 76 bp, synthetic construct; identical to SEQ ID NO: 775
  misc_feature 1..76: note = Description of sequence: 2'-Deoxy-Modified TREMs
  source 1..76: mol_type = other DNA
  misc_feature 1..76: note = DNA/RNA hybrid molecule
  misc_feature 1..57: note = RNA
  misc_feature 58: note = DNA
  misc_feature 59..76: note = RNA

SEQ ID NO: 900 - DNA, 76 bp, synthetic construct; identical to SEQ ID NO: 775
  misc_feature 1..76: note = Description of sequence: 2'-Deoxy-Modified TREMs
  source 1..76: mol_type = other DNA
  misc_feature 1..76: note = DNA/RNA hybrid molecule
  misc_feature 1..58: note = RNA
  misc_feature 59: note = DNA
  misc_feature 60..76: note = RNA

SEQ ID NO: 901 - DNA, 76 bp, synthetic construct; identical to SEQ ID NO: 775
  misc_feature 1..76: note = Description of sequence: 2'-Deoxy-Modified TREMs
  source 1..76: mol_type = other DNA
  misc_feature 1..76: note = DNA/RNA hybrid molecule
  misc_feature 1..59: note = RNA
  misc_feature 60: note = DNA
  misc_feature 61..76: note = RNA

SEQ ID NO: 902 - DNA, 76 bp, synthetic construct; identical to SEQ ID NO: 775
  misc_feature 1..76: note = Description of sequence: 2'-Deoxy-Modified TREMs
  source 1..76: mol_type = other DNA
  misc_feature 1..76: note = DNA/RNA hybrid molecule
  misc_feature 1..60: note = RNA
  misc_feature 61: note = DNA
  misc_feature 62..76: note = RNA

SEQ ID NO: 903 - DNA, 76 bp, synthetic construct; identical to SEQ ID NO: 775
  misc_feature 1..76: note = Description of sequence: 2'-Deoxy-Modified TREMs
  source 1..76: mol_type = other DNA
  misc_feature 1..76: note = DNA/RNA hybrid molecule
  misc_feature 1..61: note = RNA
  misc_feature 62: note = DNA
  misc_feature 63..76: note = RNA

SEQ ID NO: 904 - DNA, 76 bp, synthetic construct; identical to SEQ ID NO: 775
  misc_feature 1..76: note = Description of sequence: 2'-Deoxy-Modified TREMs
  source 1..76: mol_type = other DNA
  misc_feature 1..76: note = DNA/RNA hybrid molecule
  misc_feature 1..62: note = RNA
  misc_feature 63: note = DNA
  misc_feature 64..76: note = RNA

SEQ ID NO: 905 - DNA, 76 bp, synthetic construct; identical to SEQ ID NO: 775
  misc_feature 1..76: note = Description of sequence: 2'-Deoxy-Modified TREMs
  source 1..76: mol_type = other DNA
  misc_feature 1..76: note = DNA/RNA hybrid molecule
  misc_feature 1..63: note = RNA
  misc_feature 64: note = DNA
  misc_feature 65..76: note = RNA

SEQ ID NO: 906 - DNA, 76 bp, synthetic construct; identical to SEQ ID NO: 775
  misc_feature 1..76: note = Description of sequence: 2'-Deoxy-Modified TREMs
  source 1..76: mol_type = other DNA
  misc_feature 1..76: note = DNA/RNA hybrid molecule
  misc_feature 1..64: note = RNA
  misc_feature 65: note = DNA
  misc_feature 66..76: note = RNA

SEQ ID NO: 907 - DNA, 76 bp, synthetic construct; identical to SEQ ID NO: 775
  misc_feature 1..76: note = Description of sequence: 2'-Deoxy-Modified TREMs
  source 1..76: mol_type = other DNA
  misc_feature 1..76: note = DNA/RNA hybrid molecule
  misc_feature 1..65: note = RNA
  misc_feature 66: note = DNA
  misc_feature 67..76: note = RNA

SEQ ID NO: 908 - DNA, 76 bp, synthetic construct; identical to SEQ ID NO: 775
  misc_feature 1..76: note = Description of sequence: 2'-Deoxy-Modified TREMs
  source 1..76: mol_type = other DNA
  misc_feature 1..76: note = DNA/RNA hybrid molecule
  misc_feature 1..66: note = RNA
  misc_feature 67: note = DNA
  misc_feature 68..76: note = RNA

SEQ ID NO: 909 - DNA, 76 bp, synthetic construct; identical to SEQ ID NO: 775
  misc_feature 1..76: note = Description of sequence: 2'-Deoxy-Modified TREMs
  source 1..76: mol_type = other DNA
  misc_feature 1..76: note = DNA/RNA hybrid molecule
  misc_feature 1..67: note = RNA
  misc_feature 68: note = DNA
  misc_feature 69..76: note = RNA

SEQ ID NO: 910 - DNA, 76 bp, synthetic construct; identical to SEQ ID NO: 775
  misc_feature 1..76: note = Description of sequence: 2'-Deoxy-Modified TREMs
  source 1..76: mol_type = other DNA
  misc_feature 1..76: note = DNA/RNA hybrid molecule
  misc_feature 1..68: note = RNA
  misc_feature 69: note = DNA
  misc_feature 70..76: note = RNA

SEQ ID NO: 911 - DNA, 76 bp, synthetic construct; identical to SEQ ID NO: 775
  misc_feature 1..76: note = Description of sequence: 2'-Deoxy-Modified TREMs
  source 1..76: mol_type = other DNA
  misc_feature 1..76: note = DNA/RNA hybrid molecule
  misc_feature 1..69: note = RNA
  misc_feature 70: note = DNA
  misc_feature 71..76: note = RNA

SEQ ID NO: 912 - DNA, 76 bp, synthetic construct; identical to SEQ ID NO: 775
  misc_feature 1..76: note = Description of sequence: 2'-Deoxy-Modified TREMs
  source 1..76: mol_type = other DNA
  misc_feature 1..76: note = DNA/RNA hybrid molecule
  misc_feature 1..70: note = RNA
  misc_feature 71: note = DNA
  misc_feature 72..76: note = RNA

SEQ ID NO: 913 - DNA, 76 bp, synthetic construct; identical to SEQ ID NO: 775
  misc_feature 1..76: note = Description of sequence: 2'-Deoxy-Modified TREMs
  source 1..76: mol_type = other DNA
  misc_feature 1..76: note = DNA/RNA hybrid molecule
  misc_feature 1..71: note = RNA
  misc_feature 72: note = DNA
  misc_feature 73..76: note = RNA

SEQ ID NO: 914 - DNA, 76 bp, synthetic construct; identical to SEQ ID NO: 775
  misc_feature 1..76: note = Description of sequence: 2'-Deoxy-Modified TREMs
  source 1..76: mol_type = other DNA
  misc_feature 1..76: note = DNA/RNA hybrid molecule
  misc_feature 1..72: note = RNA
  misc_feature 73: note = DNA
  misc_feature 74..76: note = RNA

SEQ ID NO: 915 - DNA, 76 bp, synthetic construct; identical to SEQ ID NO: 775
  misc_feature 1..76: note = Description of sequence: 2'-Deoxy-Modified TREMs
  source 1..76: mol_type = other DNA
  misc_feature 1..76: note = DNA/RNA hybrid molecule
  misc_feature 1..73: note = RNA
  misc_feature 74: note = DNA
  misc_feature 75..76: note = RNA

SEQ ID NO: 916 - DNA, 76 bp, synthetic construct; identical to SEQ ID NO: 775
  misc_feature 1..76: note = Description of sequence: 2'-Deoxy-Modified TREMs
  source 1..76: mol_type = other DNA
  misc_feature 1..76: note = DNA/RNA hybrid molecule
  misc_feature 1..74: note = RNA
  misc_feature 75: note = DNA
  misc_feature 76: note = RNA

SEQ ID NO: 917 - DNA, 76 bp, synthetic construct; identical to SEQ ID NO: 775
  misc_feature 1..76: note = Description of sequence: 2'-Deoxy-Modified TREMs
  source 1..76: mol_type = other DNA
  misc_feature 1..76: note = DNA/RNA hybrid molecule
  misc_feature 1..75: note = RNA
  misc_feature 76: note = DNA

SEQ ID NO: 918 - RNA, 76 nt, synthetic construct; identical to SEQ ID NO: 622
  misc_feature 1..76: note = Description of Sequence: Synthetic oligonucleotide
  source 1..76: mol_type = other RNA

SEQ ID NO: 919 - RNA, 76 nt, synthetic construct; identical to SEQ ID NO: 622
  misc_feature 1..76: note = Description of Sequence: Synthetic oligonucleotide
  source 1..76: mol_type = other RNA

SEQ ID NO: 920 - RNA, 76 nt, synthetic construct; identical to SEQ ID NO: 622
  misc_feature 1..76: note = Description of Sequence: Synthetic oligonucleotide
  source 1..76: mol_type = other RNA

SEQ ID NO: 921 - RNA, 76 nt, synthetic construct; identical to SEQ ID NO: 622
  misc_feature 1..76: note = Description of Sequence: Synthetic oligonucleotide
  source 1..76: mol_type = other RNA

SEQ ID NO: 922 - RNA, 76 nt, synthetic construct; identical to SEQ ID NO: 622
  misc_feature 1..76: note = Description of Sequence: Synthetic oligonucleotide
  source 1..76: mol_type = other RNA

SEQ ID NO: 923 - RNA, 76 nt, synthetic construct; identical to SEQ ID NO: 622
  misc_feature 1..76: note = Description of Sequence: Synthetic oligonucleotide
  source 1..76: mol_type = other RNA

SEQ ID NO: 924 - RNA, 76 nt, synthetic construct; identical to SEQ ID NO: 622
  misc_feature 1..76: note = Description of Sequence: Synthetic oligonucleotide
  source 1..76: mol_type = other RNA

SEQ ID NO: 925 - RNA, 76 nt, synthetic construct; identical to SEQ ID NO: 622
  misc_feature 1..76: note = Description of Sequence: Synthetic oligonucleotide
  source 1..76: mol_type = other RNA

SEQ ID NO: 926 - RNA, 76 nt, synthetic construct; identical to SEQ ID NO: 622
  misc_feature 1..76: note = Description of Sequence: Synthetic oligonucleotide
  source 1..76: mol_type = other RNA

SEQ ID NO: 927 - RNA, 76 nt, synthetic construct; identical to SEQ ID NO: 622
  misc_feature 1..76: note = Description of Sequence: Synthetic oligonucleotide
  source 1..76: mol_type = other RNA

SEQ ID NO: 928 - RNA, 76 nt, synthetic construct; identical to SEQ ID NO: 622
  misc_feature 1..76: note = Description of Sequence: Synthetic oligonucleotide
  source 1..76: mol_type = other RNA

SEQ ID NO: 929 - RNA, 76 nt, synthetic construct; identical to SEQ ID NO: 622
  misc_feature 1..76: note = Description of Sequence: Synthetic oligonucleotide
  source 1..76: mol_type = other RNA

SEQ ID NO: 930 - RNA, 76 nt, synthetic construct; identical to SEQ ID NO: 622
  misc_feature 1..76: note = Description of Sequence: Synthetic oligonucleotide
  source 1..76: mol_type = other RNA

SEQ ID NO: 931 - RNA, 76 nt, synthetic construct; identical to SEQ ID NO: 622
  misc_feature 1..76: note = Description of Sequence: Synthetic oligonucleotide
  source 1..76: mol_type = other RNA

SEQ ID NO: 932 - RNA, 76 nt, synthetic construct; identical to SEQ ID NO: 622
  misc_feature 1..76: note = Description of Sequence: Synthetic oligonucleotide
  source 1..76: mol_type = other RNA

SEQ ID NO: 933 - RNA, 76 nt, synthetic construct; identical to SEQ ID NO: 622
  misc_feature 1..76: note = Description of Sequence: Synthetic oligonucleotide
  source 1..76: mol_type = other RNA

SEQ ID NO: 934 - RNA, 76 nt, synthetic construct; identical to SEQ ID NO: 622
  misc_feature 1..76: note = Description of Sequence: Synthetic oligonucleotide
  source 1..76: mol_type = other RNA

SEQ ID NO: 935 - RNA, 76 nt, synthetic construct; identical to SEQ ID NO: 622
  misc_feature 1..76: note = Description of Sequence: Synthetic oligonucleotide
  source 1..76: mol_type = other RNA

SEQ ID NO: 936 - RNA, 76 nt, synthetic construct; identical to SEQ ID NO: 622
  misc_feature 1..76: note = Description of Sequence: Synthetic oligonucleotide
  source 1..76: mol_type = other RNA

SEQ ID NO: 937 - RNA, 76 nt, synthetic construct; identical to SEQ ID NO: 622
  misc_feature 1..76: note = Description of Sequence: Synthetic oligonucleotide
  source 1..76: mol_type = other RNA

SEQ ID NO: 938 - RNA, 76 nt, synthetic construct; identical to SEQ ID NO: 622
  misc_feature 1..76: note = Description of Sequence: Synthetic oligonucleotide
  source 1..76: mol_type = other RNA

SEQ ID NO: 939 - RNA, 76 nt, synthetic construct; identical to SEQ ID NO: 622
  misc_feature 1..76: note = Description of Sequence: Synthetic oligonucleotide
  source 1..76: mol_type = other RNA

SEQ ID NO: 940 - RNA, 76 nt, synthetic construct; identical to SEQ ID NO: 622
  misc_feature 1..76: note = Description of Sequence: Synthetic oligonucleotide
  source 1..76: mol_type = other RNA

SEQ ID NO: 941 - RNA, 76 nt, synthetic construct; identical to SEQ ID NO: 622
  misc_feature 1..76: note = Description of Sequence: Synthetic oligonucleotide
  source 1..76: mol_type = other RNA

SEQ ID NO: 942 - RNA, 76 nt, synthetic construct; identical to SEQ ID NO: 622
  misc_feature 1..76: note = Description of Sequence: Synthetic oligonucleotide
  source 1..76: mol_type = other RNA

SEQ ID NO: 943 - RNA, 76 nt, synthetic construct; identical to SEQ ID NO: 622
  misc_feature 1..76: note = Description of Sequence: Synthetic oligonucleotide
  source 1..76: mol_type = other RNA

SEQ ID NO: 944 - RNA, 76 nt, synthetic construct; identical to SEQ ID NO: 622
  misc_feature 1..76: note = Description of Sequence: Synthetic oligonucleotide
  source 1..76: mol_type = other RNA

SEQ ID NO: 945 - RNA, 76 nt, synthetic construct; identical to SEQ ID NO: 622
  misc_feature 1..76: note = Description of Sequence: Synthetic oligonucleotide
  source 1..76: mol_type = other RNA

SEQ ID NO: 946 - RNA, 76 nt, synthetic construct; identical to SEQ ID NO: 622
  misc_feature 1..76: note = Description of Sequence: Synthetic oligonucleotide
  source 1..76: mol_type = other RNA

SEQ ID NO: 947 - RNA, 76 nt, synthetic construct; identical to SEQ ID NO: 622
  misc_feature 1..76: note = Description of Sequence: Synthetic oligonucleotide
  source 1..76: mol_type = other RNA

SEQ ID NO: 948 - RNA, 76 nt, synthetic construct; identical to SEQ ID NO: 622
  misc_feature 1..76: note = Description of Sequence: Synthetic oligonucleotide
  source 1..76: mol_type = other RNA

SEQ ID NO: 949 - RNA, 76 nt, synthetic construct; identical to SEQ ID NO: 622
  misc_feature 1..76: note = Description of Sequence: Synthetic oligonucleotide
  source 1..76: mol_type = other RNA

SEQ ID NO: 950 - RNA, 76 nt, synthetic construct; identical to SEQ ID NO: 622
  misc_feature 1..76: note = Description of Sequence: Synthetic oligonucleotide
  source 1..76: mol_type = other RNA

SEQ ID NO: 951 - RNA, 76 nt, synthetic construct; identical to SEQ ID NO: 622
  misc_feature 1..76: note = Description of Sequence: Synthetic oligonucleotide
  source 1..76: mol_type = other RNA

SEQ ID NO: 952 - RNA, 76 nt, synthetic construct; identical to SEQ ID NO: 622
  misc_feature 1..76: note = Description of Sequence: Synthetic oligonucleotide
  source 1..76: mol_type = other RNA

SEQ ID NO: 953 - RNA, 76 nt, synthetic construct; identical to SEQ ID NO: 622
  misc_feature 1..76: note = Description of Sequence: Synthetic oligonucleotide
  source 1..76: mol_type = other RNA

SEQ ID NO: 954 - RNA, 76 nt, synthetic construct; identical to SEQ ID NO: 622
  misc_feature 1..76: note = Description of Sequence: Synthetic oligonucleotide
  source 1..76: mol_type = other RNA

SEQ ID NO: 955 - RNA, 76 nt, synthetic construct; identical to SEQ ID NO: 622
  misc_feature 1..76: note = Description of Sequence: Synthetic oligonucleotide
  source 1..76: mol_type = other RNA

SEQ ID NO: 956 - RNA, 76 nt, synthetic construct; identical to SEQ ID NO: 622
  misc_feature 1..76: note = Description of Sequence: Synthetic oligonucleotide
  source 1..76: mol_type = other RNA

SEQ ID NO: 957 - RNA, 76 nt, synthetic construct; identical to SEQ ID NO: 622
  misc_feature 1..76: note = Description of Sequence: Synthetic oligonucleotide
  source 1..76: mol_type = other RNA

SEQ ID NO: 958 - RNA, 76 nt, synthetic construct; identical to SEQ ID NO: 622
  misc_feature 1..76: note = Description of Sequence: Synthetic oligonucleotide
  source 1..76: mol_type = other RNA

SEQ ID NO: 959 - RNA, 76 nt, synthetic construct; identical to SEQ ID NO: 622
  misc_feature 1..76: note = Description of Sequence: Synthetic oligonucleotide
  source 1..76: mol_type = other RNA

SEQ ID NO: 960 - RNA, 76 nt, synthetic construct; identical to SEQ ID NO: 622
  misc_feature 1..76: note = Description of Sequence: Synthetic oligonucleotide
  source 1..76: mol_type = other RNA

SEQ ID NO: 961 - RNA, 76 nt, synthetic construct; identical to SEQ ID NO: 622
  misc_feature 1..76: note = Description of Sequence: Synthetic oligonucleotide
  source 1..76: mol_type = other RNA

SEQ ID NO: 962 - RNA, 76 nt, synthetic construct; identical to SEQ ID NO: 622
  misc_feature 1..76: note = Description of Sequence: Synthetic oligonucleotide
  source 1..76: mol_type = other RNA

SEQ ID NO: 963 - RNA, 76 nt, synthetic construct; identical to SEQ ID NO: 622
  misc_feature 1..76: note = Description of Sequence: Synthetic oligonucleotide
  source 1..76: mol_type = other RNA

SEQ ID NO: 964 - RNA, 76 nt, synthetic construct; identical to SEQ ID NO: 622
  misc_feature 1..76: note = Description of Sequence: Synthetic oligonucleotide
  source 1..76: mol_type = other RNA

SEQ ID NO: 965 - RNA, 76 nt, synthetic construct; identical to SEQ ID NO: 622
  misc_feature 1..76: note = Description of Sequence: Synthetic oligonucleotide
  source 1..76: mol_type = other RNA

SEQ ID NO: 966 - RNA, 76 nt, synthetic construct; identical to SEQ ID NO: 622
  misc_feature 1..76: note = Description of Sequence: Synthetic oligonucleotide
  source 1..76: mol_type = other RNA

SEQ ID NO: 967 - RNA, 76 nt, synthetic construct; identical to SEQ ID NO: 622
  misc_feature 1..76: note = Description of Sequence: Synthetic oligonucleotide
  source 1..76: mol_type = other RNA

SEQ ID NO: 968 - RNA, 76 nt, synthetic construct; identical to SEQ ID NO: 622
  misc_feature 1..76: note = Description of Sequence: Synthetic oligonucleotide
  source 1..76: mol_type = other RNA

SEQ ID NO: 969 - RNA, 76 nt, synthetic construct; identical to SEQ ID NO: 622
  misc_feature 1..76: note = Description of Sequence: Synthetic oligonucleotide
  source 1..76: mol_type = other RNA

SEQ ID NO: 970 - RNA, 76 nt, synthetic construct; identical to SEQ ID NO: 622
  misc_feature 1..76: note = Description of Sequence: Synthetic oligonucleotide
  source 1..76: mol_type = other RNA

SEQ ID NO: 971 - RNA, 76 nt, synthetic construct; identical to SEQ ID NO: 622
  misc_feature 1..76: note = Description of Sequence: Synthetic oligonucleotide
  source 1..76: mol_type = other RNA

SEQ ID NO: 972 - RNA, 76 nt, synthetic construct; identical to SEQ ID NO: 622
  misc_feature 1..76: note = Description of Sequence: Synthetic oligonucleotide
  source 1..76: mol_type = other RNA

SEQ ID NO: 973 - RNA, 76 nt, synthetic construct; identical to SEQ ID NO: 622
  misc_feature 1..76: note = Description of Sequence: Synthetic oligonucleotide
  source 1..76: mol_type = other RNA

SEQ ID NO: 974 - RNA, 76 nt, synthetic construct; identical to SEQ ID NO: 622
  misc_feature 1..76: note = Description of Sequence: Synthetic oligonucleotide
  source 1..76: mol_type = other RNA

SEQ ID NO: 975 - RNA, 76 nt, synthetic construct; identical to SEQ ID NO: 622
  misc_feature 1..76: note = Description of Sequence: Synthetic oligonucleotide
  source 1..76: mol_type = other RNA

SEQ ID NO: 976 - RNA, 76 nt, synthetic construct; identical to SEQ ID NO: 622
  misc_feature 1..76: note = Description of Sequence: Synthetic oligonucleotide
  source 1..76: mol_type = other RNA

SEQ ID NO: 977 - RNA, 76 nt, synthetic construct; identical to SEQ ID NO: 622
  misc_feature 1..76: note = Description of Sequence: Synthetic oligonucleotide
  source 1..76: mol_type = other RNA

SEQ ID NO: 978 - RNA, 76 nt, synthetic construct; identical to SEQ ID NO: 622
  misc_feature 1..76: note = Description of Sequence: Synthetic oligonucleotide
  source 1..76: mol_type = other RNA

SEQ ID NO: 979 - RNA, 76 nt, synthetic construct; identical to SEQ ID NO: 622
  misc_feature 1..76: note = Description of Sequence: Synthetic oligonucleotide
  source 1..76: mol_type = other RNA

SEQ ID NO: 980 - RNA, 76 nt, synthetic construct; identical to SEQ ID NO: 622
  misc_feature 1..76: note = Description of Sequence: Synthetic oligonucleotide
  source 1..76: mol_type = other RNA

SEQ ID NO: 981 - RNA, 76 nt, synthetic construct; identical to SEQ ID NO: 622
  misc_feature 1..76: note = Description of Sequence: Synthetic oligonucleotide
  source 1..76: mol_type = other RNA

SEQ ID NO: 982 - RNA, 76 nt, synthetic construct; identical to SEQ ID NO: 622
  misc_feature 1..76: note = Description of Sequence: Synthetic oligonucleotide
  source 1..76: mol_type = other RNA

SEQ ID NO: 983 - RNA, 76 nt, synthetic construct; identical to SEQ ID NO: 622
  misc_feature 1..76: note = Description of Sequence: Synthetic oligonucleotide
  source 1..76: mol_type = other RNA

SEQ ID NO: 984 - RNA, 76 nt, synthetic construct; identical to SEQ ID NO: 622
  misc_feature 1..76: note = Description of Sequence: Synthetic oligonucleotide
  source 1..76: mol_type = other RNA

SEQ ID NO: 985 - RNA, 76 nt, synthetic construct; identical to SEQ ID NO: 622
  misc_feature 1..76: note = Description of Sequence: Synthetic oligonucleotide
  source 1..76: mol_type = other RNA

SEQ ID NO: 986 - RNA, 76 nt, synthetic construct; identical to SEQ ID NO: 622
  misc_feature 1..76: note = Description of Sequence: Synthetic oligonucleotide
  source 1..76: mol_type = other RNA

SEQ ID NO: 987 - RNA, 76 nt, synthetic construct; identical to SEQ ID NO: 622
  misc_feature 1..76: note = Description of Sequence: Synthetic oligonucleotide
  source 1..76: mol_type = other RNA

SEQ ID NO: 988 - RNA, 76 nt, synthetic construct; identical to SEQ ID NO: 622
  misc_feature 1..76: note = Description of Sequence: Synthetic oligonucleotide
  source 1..76: mol_type = other RNA

SEQ ID NO: 989 - RNA, 76 nt, synthetic construct; identical to SEQ ID NO: 622
  misc_feature 1..76: note = Description of Sequence: Synthetic oligonucleotide
  source 1..76: mol_type = other RNA

SEQ ID NO: 990 - RNA, 76 nt, synthetic construct; identical to SEQ ID NO: 622
  misc_feature 1..76: note = Description of Sequence: Synthetic oligonucleotide
  source 1..76: mol_type = other RNA

SEQ ID NO: 991 - RNA, 76 nt, synthetic construct; identical to SEQ ID NO: 622
  misc_feature 1..76: note = Description of Sequence: Synthetic oligonucleotide
  source 1..76: mol_type = other RNA

SEQ ID NO: 992 - RNA, 76 nt, synthetic construct; identical to SEQ ID NO: 622
  misc_feature 1..76: note = Description of Sequence: Synthetic oligonucleotide
  source 1..76: mol_type = other RNA

SEQ ID NO: 993 - RNA, 85 nt, synthetic construct
  misc_feature 1..85: note = Description of Sequence: Synthetic oligonucleotide
  source 1..85: mol_type = other RNA
gacgaggtggccgagtggttaaggcgatggactctaaatccattgtgctctgcacgcgtgggttcgaatcccatcctcgtcgcca

SEQ ID NO: 994 - RNA, 85 nt, synthetic construct; identical to SEQ ID NO: 993
  misc_feature 1..85: note = Description of Sequence: Synthetic oligonucleotide
  source 1..85: mol_type = other RNA

SEQ ID NO: 995 - RNA, 85 nt, synthetic construct; identical to SEQ ID NO: 993
  misc_feature 1..85: note = Description of Sequence: Synthetic oligonucleotide
  source 1..85: mol_type = other RNA

SEQ ID NO: 996 - RNA, 85 nt, synthetic construct; identical to SEQ ID NO: 993
  misc_feature 1..85: note = Description of Sequence: Synthetic oligonucleotide
  source 1..85: mol_type = other RNA

SEQ ID NO: 997 - RNA, 85 nt, synthetic construct; identical to SEQ ID NO: 993
  misc_feature 1..85: note = Description of Sequence: Synthetic oligonucleotide
  source 1..85: mol_type = other RNA

SEQ ID NO: 998 - RNA, 85 nt, synthetic construct; identical to SEQ ID NO: 993
  misc_feature 1..85: note = Description of Sequence: Synthetic oligonucleotide
  source 1..85: mol_type = other RNA

SEQ ID NO: 999 - RNA, 85 nt, synthetic construct; identical to SEQ ID NO: 993
  misc_feature 1..85: note = Description of Sequence: Synthetic oligonucleotide
  source 1..85: mol_type = other RNA

SEQ ID NO: 1000 - RNA, 85 nt, synthetic construct; identical to SEQ ID NO: 993
  misc_feature 1..85: note = Description of Sequence: Synthetic oligonucleotide
  source 1..85: mol_type = other RNA

SEQ ID NO: 1001 - RNA, 85 nt, synthetic construct; identical to SEQ ID NO: 993
  misc_feature 1..85: note = Description of Sequence: Synthetic oligonucleotide
  source 1..85: mol_type = other RNA

SEQ ID NO: 1002 - RNA, 85 nt, synthetic construct; identical to SEQ ID NO: 993
  misc_feature 1..85: note = Description of Sequence: Synthetic oligonucleotide
  source 1..85: mol_type = other RNA

SEQ ID NO: 1003 - RNA, 85 nt, synthetic construct; identical to SEQ ID NO: 993
  misc_feature 1..85: note = Description of Sequence: Synthetic oligonucleotide
  source 1..85: mol_type = other RNA

SEQ ID NO: 1004 - RNA, 85 nt, synthetic construct; identical to SEQ ID NO: 993
  misc_feature 1..85: note = Description of Sequence: Synthetic oligonucleotide
  source 1..85: mol_type = other RNA

SEQ ID NO: 1005 - RNA, 85 nt, synthetic construct; identical to SEQ ID NO: 993
  misc_feature 1..85: note = Description of Sequence: Synthetic oligonucleotide
  source 1..85: mol_type = other RNA

SEQ ID NO: 1006 - RNA, 85 nt, synthetic construct; identical to SEQ ID NO: 993
  misc_feature 1..85: note = Description of Sequence: Synthetic oligonucleotide
  source 1..85: mol_type = other RNA

SEQ ID NO: 1007 - RNA, 85 nt, synthetic construct; identical to SEQ ID NO: 993
  misc_feature 1..85: note = Description of Sequence: Synthetic oligonucleotide
  source 1..85: mol_type = other RNA

SEQ ID NO: 1008 - RNA, 85 nt, synthetic construct; identical to SEQ ID NO: 993
  misc_feature 1..85: note = Description of Sequence: Synthetic oligonucleotide
  source 1..85: mol_type = other RNA

SEQ ID NO: 1009 - RNA, 85 nt, synthetic construct; identical to SEQ ID NO: 993
  misc_feature 1..85: note = Description of Sequence: Synthetic oligonucleotide
  source 1..85: mol_type = other RNA

SEQ ID NO: 1010 - RNA, 85 nt, synthetic construct; identical to SEQ ID NO: 993
  misc_feature 1..85: note = Description of Sequence: Synthetic oligonucleotide
  source 1..85: mol_type = other RNA

SEQ ID NO: 1011 - RNA, 85 nt, synthetic construct; identical to SEQ ID NO: 993
  misc_feature 1..85: note = Description of Sequence: Synthetic oligonucleotide
  source 1..85: mol_type = other RNA

SEQ ID NO: 1012 - RNA, 85 nt, synthetic construct; identical to SEQ ID NO: 993
  misc_feature 1..85: note = Description of Sequence: Synthetic oligonucleotide
  source 1..85: mol_type = other RNA

SEQ ID NO: 1013 - RNA, 85 nt, synthetic construct; identical to SEQ ID NO: 993
  misc_feature 1..85: note = Description of Sequence: Synthetic oligonucleotide
  source 1..85: mol_type = other RNA

SEQ ID NO: 1014 - RNA, 85 nt, synthetic construct; identical to SEQ ID NO: 993
  misc_feature 1..85: note = Description of Sequence: Synthetic oligonucleotide
  source 1..85: mol_type = other RNA

SEQ ID NO: 1015 - RNA, 85 nt, synthetic construct; identical to SEQ ID NO: 993
  misc_feature 1..85: note = Description of Sequence: Synthetic oligonucleotide
  source 1..85: mol_type = other RNA

SEQ ID NO: 1016 - RNA, 85 nt, synthetic construct; identical to SEQ ID NO: 993
  misc_feature 1..85: note = Description of Sequence: Synthetic oligonucleotide
  source 1..85: mol_type = other RNA

SEQ ID NO: 1017 - RNA, 85 nt, synthetic construct; identical to SEQ ID NO: 993
  misc_feature 1..85: note = Description of Sequence: Synthetic oligonucleotide
  source 1..85: mol_type = other RNA

SEQ ID NO: 1018 - RNA, 85 nt, synthetic construct; identical to SEQ ID NO: 993
  misc_feature 1..85: note = Description of Sequence: Synthetic oligonucleotide
  source 1..85: mol_type = other RNA

SEQ ID NO: 1019 - RNA, 85 nt, synthetic construct; identical to SEQ ID NO: 993
  misc_feature 1..85: note = Description of Sequence: Synthetic oligonucleotide
  source 1..85: mol_type = other RNA

SEQ ID NO: 1020 - RNA, 85 nt, synthetic construct; identical to SEQ ID NO: 993
  misc_feature 1..85: note = Description of Sequence: Synthetic oligonucleotide
  source 1..85: mol_type = other RNA

SEQ ID NO: 1021 - RNA, 85 nt, synthetic construct; identical to SEQ ID NO: 993
  misc_feature 1..85: note = Description of Sequence: Synthetic oligonucleotide
  source 1..85: mol_type = other RNA

SEQ ID NO: 1022 - RNA, 85 nt, synthetic construct; identical to SEQ ID NO: 993
  misc_feature 1..85: note = Description of Sequence: Synthetic oligonucleotide
  source 1..85: mol_type = other RNA

SEQ ID NO: 1023 - RNA, 85 nt, synthetic construct; identical to SEQ ID NO: 993
  misc_feature 1..85: note = Description of Sequence: Synthetic oligonucleotide
  source 1..85: mol_type = other RNA

SEQ ID NO: 1024 - RNA, 85 nt, synthetic construct; identical to SEQ ID NO: 993
  misc_feature 1..85: note = Description of Sequence: Synthetic oligonucleotide
  source 1..85: mol_type = other RNA

SEQ ID NO: 1025 - RNA, 85 nt, synthetic construct; identical to SEQ ID NO: 993
  misc_feature 1..85: note = Description of Sequence: Synthetic oligonucleotide
  source 1..85: mol_type = other RNA

SEQ ID NO: 1026 - RNA, 85 nt, synthetic construct; identical to SEQ ID NO: 993
  misc_feature 1..85: note = Description of Sequence: Synthetic oligonucleotide
  source 1..85: mol_type = other RNA

SEQ ID NO: 1027 - RNA, 85 nt, synthetic construct; identical to SEQ ID NO: 993
  misc_feature 1..85: note = Description of Sequence: Synthetic oligonucleotide
  source 1..85: mol_type = other RNA

SEQ ID NO: 1028 - RNA, 85 nt, synthetic construct; identical to SEQ ID NO: 993
  misc_feature 1..85: note = Description of Sequence: Synthetic oligonucleotide
  source 1..85: mol_type = other RNA

SEQ ID NO: 1029 - RNA, 85 nt, synthetic construct; identical to SEQ ID NO: 993
  misc_feature 1..85: note = Description of Sequence: Synthetic oligonucleotide
  source 1..85: mol_type = other RNA

SEQ ID NO: 1030 - RNA, 85 nt, synthetic construct; identical to SEQ ID NO: 993
  misc_feature 1..85: note = Description of Sequence: Synthetic oligonucleotide
  source 1..85: mol_type = other RNA

SEQ ID NO: 1031 - RNA, 85 nt, synthetic construct; identical to SEQ ID NO: 993
  misc_feature 1..85: note = Description of Sequence: Synthetic oligonucleotide
  source 1..85: mol_type = other RNA

SEQ ID NO: 1032 - RNA, 85 nt, synthetic construct; identical to SEQ ID NO: 993
  misc_feature 1..85: note = Description of Sequence: Synthetic oligonucleotide
  source 1..85: mol_type = other RNA

SEQ ID NO: 1033 - RNA, 85 nt, synthetic construct; identical to SEQ ID NO: 993
  misc_feature 1..85: note = Description of Sequence: Synthetic oligonucleotide
  source 1..85: mol_type = other RNA

SEQ ID NO: 1034 - RNA, 85 nt, synthetic construct; identical to SEQ ID NO: 993
  misc_feature 1..85: note = Description of Sequence: Synthetic oligonucleotide
  source 1..85: mol_type = other RNA

SEQ ID NO: 1035 - RNA, 85 nt, synthetic construct; identical to SEQ ID NO: 993
  misc_feature 1..85: note = Description of Sequence: Synthetic oligonucleotide
  source 1..85: mol_type = other RNA

SEQ ID NO: 1036 - RNA, 85 nt, synthetic construct; identical to SEQ ID NO: 993
  misc_feature 1..85: note = Description of Sequence: Synthetic oligonucleotide
  source 1..85: mol_type = other RNA

SEQ ID NO: 1037 - RNA, 85 nt, synthetic construct; identical to SEQ ID NO: 993
  misc_feature 1..85: note = Description of Sequence: Synthetic oligonucleotide
  source 1..85: mol_type = other RNA

SEQ ID NO: 1038 - RNA, 85 nt, synthetic construct; identical to SEQ ID NO: 993
  misc_feature 1..85: note = Description of Sequence: Synthetic oligonucleotide
  source 1..85: mol_type = other RNA

SEQ ID NO: 1039 - RNA, 85 nt, synthetic construct; identical to SEQ ID NO: 993
  misc_feature 1..85: note = Description of Sequence: Synthetic oligonucleotide
  source 1..85: mol_type = other RNA

SEQ ID NO: 1040 - RNA, 85 nt, synthetic construct; identical to SEQ ID NO: 993
  misc_feature 1..85: note = Description of Sequence: Synthetic oligonucleotide
  source 1..85: mol_type = other RNA

SEQ ID NO: 1041 - RNA, 85 nt, synthetic construct; identical to SEQ ID NO: 993
  misc_feature 1..85: note = Description of Sequence: Synthetic oligonucleotide
  source 1..85: mol_type = other RNA

SEQ ID NO: 1042 - RNA, 85 nt, synthetic construct; identical to SEQ ID NO: 993
  misc_feature 1..85: note = Description of Sequence: Synthetic oligonucleotide
  source 1..85: mol_type = other RNA

SEQ ID NO: 1043 - RNA, 85 nt, synthetic construct; identical to SEQ ID NO: 993
  misc_feature 1..85: note = Description of Sequence: Synthetic oligonucleotide
  source 1..85: mol_type = other RNA

SEQ ID NO: 1044 - RNA, 85 nt, synthetic construct; identical to SEQ ID NO: 993
  misc_feature 1..85: note = Description of Sequence: Synthetic oligonucleotide
  source 1..85: mol_type = other RNA

SEQ ID NO: 1045 - RNA, 85 nt, synthetic construct; identical to SEQ ID NO: 993
  misc_feature 1..85: note = Description of Sequence: Synthetic oligonucleotide
  source 1..85: mol_type = other RNA

SEQ ID NO: 1046 - RNA, 85 nt, synthetic construct; identical to SEQ ID NO: 993
  misc_feature 1..85: note = Description of Sequence: Synthetic oligonucleotide
  source 1..85: mol_type = other RNA

SEQ ID NO: 1047 - RNA, 85 nt, synthetic construct; identical to SEQ ID NO: 993
  misc_feature 1..85: note = Description of Sequence: Synthetic oligonucleotide
  source 1..85: mol_type = other RNA

SEQ ID NO: 1048 - RNA, 85 nt, synthetic construct; identical to SEQ ID NO: 993
  misc_feature 1..85: note = Description of Sequence: Synthetic oligonucleotide
  source 1..85: mol_type = other RNA

SEQ ID NO: 1049 - RNA, 85 nt, synthetic construct; identical to SEQ ID NO: 993
  misc_feature 1..85: note = Description of Sequence: Synthetic oligonucleotide
  source 1..85: mol_type = other RNA

SEQ ID NO: 1050 - RNA, 85 nt, synthetic construct; identical to SEQ ID NO: 993
  misc_feature 1..85: note = Description of Sequence: Synthetic oligonucleotide
  source 1..85: mol_type = other RNA

SEQ ID NO: 1051 - RNA, 85 nt, synthetic construct; identical to SEQ ID NO: 993
  misc_feature 1..85: note = Description of Sequence: Synthetic oligonucleotide
  source 1..85: mol_type = other RNA

SEQ ID NO: 1052 - RNA, 85 nt, synthetic construct; identical to SEQ ID NO: 993
  misc_feature 1..85: note = Description of Sequence: Synthetic oligonucleotide
  source 1..85: mol_type = other RNA

SEQ ID NO: 1053 - RNA, 85 nt, synthetic construct; identical to SEQ ID NO: 993
  misc_feature 1..85: note = Description of Sequence: Synthetic oligonucleotide
  source 1..85: mol_type = other RNA

SEQ ID NO: 1054 - RNA, 85 nt, synthetic construct; identical to SEQ ID NO: 993
  misc_feature 1..85: note = Description of Sequence: Synthetic oligonucleotide
  source 1..85: mol_type = other RNA

SEQ ID NO: 1055 - RNA, 85 nt, synthetic construct; identical to SEQ ID NO: 993
  misc_feature 1..85: note = Description of Sequence: Synthetic oligonucleotide
  source 1..85: mol_type = other RNA

SEQ ID NO: 1056 - RNA, 85 nt, synthetic construct; identical to SEQ ID NO: 993
  misc_feature 1..85: note = Description of Sequence: Synthetic oligonucleotide
  source 1..85: mol_type = other RNA

SEQ ID NO: 1057 - RNA, 85 nt, synthetic construct; identical to SEQ ID NO: 993
  misc_feature 1..85: note = Description of Sequence: Synthetic oligonucleotide
  source 1..85: mol_type = other RNA

SEQ ID NO: 1058 - RNA, 85 nt, synthetic construct; identical to SEQ ID NO: 993
  misc_feature 1..85: note = Description of Sequence: Synthetic oligonucleotide
  source 1..85: mol_type = other RNA

SEQ ID NO: 1059 - RNA, 85 nt, synthetic construct; identical to SEQ ID NO: 993
  misc_feature 1..85: note = Description of Sequence: Synthetic oligonucleotide
  source 1..85: mol_type = other RNA

SEQ ID NO: 1060 - RNA, 85 nt, synthetic construct; identical to SEQ ID NO: 993
  misc_feature 1..85: note = Description of Sequence: Synthetic oligonucleotide
  source 1..85: mol_type = other RNA

SEQ ID NO: 1061 - RNA, 85 nt, synthetic construct; identical to SEQ ID NO: 993
  misc_feature 1..85: note = Description of Sequence: Synthetic oligonucleotide
  source 1..85: mol_type = other RNA

SEQ ID NO: 1062 - RNA, 85 nt, synthetic construct; identical to SEQ ID NO: 993
  misc_feature 1..85: note = Description of Sequence: Synthetic oligonucleotide
  source 1..85: mol_type = other RNA

SEQ ID NO: 1063 - RNA, 85 nt, synthetic construct; identical to SEQ ID NO: 993
  misc_feature 1..85: note = Description of Sequence: Synthetic oligonucleotide
  source 1..85: mol_type = other RNA

SEQ ID NO: 1064 - RNA, 85 nt, synthetic construct; identical to SEQ ID NO: 993
  misc_feature 1..85: note = Description of Sequence: Synthetic oligonucleotide
  source 1..85: mol_type = other RNA

SEQ ID NO: 1065 - RNA, 85 nt, synthetic construct; identical to SEQ ID NO: 993
  misc_feature 1..85: note = Description of Sequence: Synthetic oligonucleotide
  source 1..85: mol_type = other RNA

SEQ ID NO: 1066 - RNA, 85 nt, synthetic construct; identical to SEQ ID NO: 993
  misc_feature 1..85: note = Description of Sequence: Synthetic oligonucleotide
  source 1..85: mol_type = other RNA

SEQ ID NO: 1067 - RNA, 85 nt, synthetic construct; identical to SEQ ID NO: 993
  misc_feature 1..85: note = Description of Sequence: Synthetic oligonucleotide
  source 1..85: mol_type = other RNA

SEQ ID NO: 1068 - RNA, 85 nt, synthetic construct; identical to SEQ ID NO: 993
  misc_feature 1..85: note = Description of Sequence: Synthetic oligonucleotide
  source 1..85: mol_type = other RNA

SEQ ID NO: 1069 - RNA, 85 nt, synthetic construct; identical to SEQ ID NO: 993
  misc_feature 1..85: note = Description of Sequence: Synthetic oligonucleotide
  source 1..85: mol_type = other RNA

SEQ ID NO: 1070 - RNA, 85 nt, synthetic construct; identical to SEQ ID NO: 993
  misc_feature 1..85: note = Description of Sequence: Synthetic oligonucleotide
  source 1..85: mol_type = other RNA

SEQ ID NO: 1071 - RNA, 85 nt, synthetic construct; identical to SEQ ID NO: 993
  misc_feature 1..85: note = Description of Sequence: Synthetic oligonucleotide
  source 1..85: mol_type = other RNA

SEQ ID NO: 1072 - RNA, 85 nt, synthetic construct; identical to SEQ ID NO: 993
  misc_feature 1..85: note = Description of Sequence: Synthetic oligonucleotide
  source 1..85: mol_type = other RNA

SEQ ID NO: 1073 - RNA, 85 nt, synthetic construct; identical to SEQ ID NO: 993
  misc_feature 1..85: note = Description of Sequence: Synthetic oligonucleotide
  source 1..85: mol_type = other RNA

SEQ ID NO: 1074 - RNA, 85 nt, synthetic construct; identical to SEQ ID NO: 993
  misc_feature 1..85: note = Description of Sequence: Synthetic oligonucleotide
  source 1..85: mol_type = other RNA

SEQ ID NO: 1075 - RNA, 85 nt, synthetic construct; identical to SEQ ID NO: 993
  misc_feature 1..85: note = Description of Sequence: Synthetic oligonucleotide
  source 1..85: mol_type = other RNA

SEQ ID NO: 1076 - RNA, 85 nt, synthetic construct; identical to SEQ ID NO: 993
  misc_feature 1..85: note = Description of Sequence: Synthetic oligonucleotide
  source 1..85: mol_type = other RNA

SEQ ID NO: 1077 - RNA, 85 nt, synthetic construct; identical to SEQ ID NO: 993
  misc_feature 1..85: note = Description of Sequence: Synthetic oligonucleotide
  source 1..85: mol_type = other RNA

SEQ ID NO: 1078 - RNA, 85 nt, synthetic construct; identical to SEQ ID NO: 993
  misc_feature 1..85: note = Description of Sequence: Synthetic oligonucleotide
  source 1..85: mol_type = other RNA

SEQ ID NO: 1079 - RNA, 75 nt, synthetic construct
  misc_feature 1..75: note = Description of Sequence: Synthetic oligonucleotide
  source 1..75: mol_type = other RNA
ggttccatggtgtaatggtaagcactctggactttaaatccagcgatccgagttcgagtctcggtggaacctcca

SEQ ID NO: 1080 - RNA, 75 nt, synthetic construct; identical to SEQ ID NO: 1079
  misc_feature 1..75: note = Description of Sequence: Synthetic oligonucleotide
  source 1..75: mol_type = other RNA

SEQ ID NO: 1081 - RNA, 75 nt, synthetic construct; identical to SEQ ID NO: 1079
  misc_feature 1..75: note = Description of Sequence: Synthetic oligonucleotide
  source 1..75: mol_type = other RNA

SEQ ID NO: 1082 - RNA, 75 nt, synthetic construct; identical to SEQ ID NO: 1079
  misc_feature 1..75: note = Description of Sequence: Synthetic oligonucleotide
  source 1..75: mol_type = other RNA

SEQ ID NO: 1083 - RNA, 75 nt, synthetic construct; identical to SEQ ID NO: 1079
  misc_feature 1..75: note = Description of Sequence: Synthetic oligonucleotide
  source 1..75: mol_type = other RNA

SEQ ID NO: 1084 - RNA, 75 nt, synthetic construct; identical to SEQ ID NO: 1079
  misc_feature 1..75: note = Description of Sequence: Synthetic oligonucleotide
  source 1..75: mol_type = other RNA

SEQ ID NO: 1085 - RNA, 75 nt, synthetic construct; identical to SEQ ID NO: 1079
  misc_feature 1..75: note = Description of Sequence: Synthetic oligonucleotide
  source 1..75: mol_type = other RNA

SEQ ID NO: 1086 - RNA, 75 nt, synthetic construct; identical to SEQ ID NO: 1079
  misc_feature 1..75: note = Description of Sequence: Synthetic oligonucleotide
  source 1..75: mol_type = other RNA

SEQ ID NO: 1087 - RNA, 75 nt, synthetic construct; identical to SEQ ID NO: 1079
  misc_feature 1..75: note = Description of Sequence: Synthetic oligonucleotide
  source 1..75: mol_type = other RNA

SEQ ID NO: 1088 - RNA, 75 nt, synthetic construct; identical to SEQ ID NO: 1079
  misc_feature 1..75: note = Description of Sequence: Synthetic oligonucleotide
  source 1..75: mol_type = other RNA

SEQ ID NO: 1089 - RNA, 75 nt, synthetic construct; identical to SEQ ID NO: 1079
  misc_feature 1..75: note = Description of Sequence: Synthetic oligonucleotide
  source 1..75: mol_type = other RNA

SEQ ID NO: 1090 - RNA, 75 nt, synthetic construct; identical to SEQ ID NO: 1079
  misc_feature 1..75: note = Description of Sequence: Synthetic oligonucleotide
  source 1..75: mol_type = other RNA

SEQ ID NO: 1091 - RNA, 75 nt, synthetic construct; identical to SEQ ID NO: 1079
  misc_feature 1..75: note = Description of Sequence: Synthetic oligonucleotide
  source 1..75: mol_type = other RNA

SEQ ID NO: 1092 - RNA, 75 nt, synthetic construct; identical to SEQ ID NO: 1079
  misc_feature 1..75: note = Description of Sequence: Synthetic oligonucleotide
  source 1..75: mol_type = other RNA

SEQ ID NO: 1093 - RNA, 75 nt, synthetic construct; identical to SEQ ID NO: 1079
  misc_feature 1..75: note = Description of Sequence: Synthetic oligonucleotide
  source 1..75: mol_type = other RNA

SEQ ID NO: 1094 - RNA, 75 nt, synthetic construct; identical to SEQ ID NO: 1079
  misc_feature 1..75: note = Description of Sequence: Synthetic oligonucleotide
  source 1..75: mol_type = other RNA

SEQ ID NO: 1095 - RNA, 75 nt, synthetic construct; identical to SEQ ID NO: 1079
  misc_feature 1..75: note = Description of Sequence: Synthetic oligonucleotide
  source 1..75: mol_type = other RNA

SEQ ID NO: 1096 - RNA, 75 nt, synthetic construct; identical to SEQ ID NO: 1079
  misc_feature 1..75: note = Description of Sequence: Synthetic oligonucleotide
  source 1..75: mol_type = other RNA

SEQ ID NO: 1097 - RNA, 75 nt, synthetic construct; identical to SEQ ID NO: 1079
  misc_feature 1..75: note = Description of Sequence: Synthetic oligonucleotide
  source 1..75: mol_type = other RNA

SEQ ID NO: 1098 - RNA, 75 nt, synthetic construct; identical to SEQ ID NO: 1079
  misc_feature 1..75: note = Description of Sequence: Synthetic oligonucleotide
  source 1..75: mol_type = other RNA

SEQ ID NO: 1099 - RNA, 75 nt, synthetic construct; identical to SEQ ID NO: 1079
  misc_feature 1..75: note = Description of Sequence: Synthetic oligonucleotide
  source 1..75: mol_type = other RNA

SEQ ID NO: 1100 - RNA, 75 nt, synthetic construct; identical to SEQ ID NO: 1079
  misc_feature 1..75: note = Description of Sequence: Synthetic oligonucleotide
  source 1..75: mol_type = other RNA

SEQ ID NO: 1101 - RNA, 75 nt, synthetic construct; identical to SEQ ID NO: 1079
  misc_feature 1..75: note = Description of Sequence: Synthetic oligonucleotide
  source 1..75: mol_type = other RNA

SEQ ID NO: 1102 - RNA, 75 nt, synthetic construct; identical to SEQ ID NO: 1079
  misc_feature 1..75: note = Description of Sequence: Synthetic oligonucleotide
  source 1..75: mol_type = other RNA

SEQ ID NO: 1103 - RNA, 75 nt, synthetic construct; identical to SEQ ID NO: 1079
  misc_feature 1..75: note = Description of Sequence: Synthetic oligonucleotide
  source 1..75: mol_type = other RNA

SEQ ID NO: 1104 - RNA, 75 nt, synthetic construct; identical to SEQ ID NO: 1079
  misc_feature 1..75: note = Description of Sequence: Synthetic oligonucleotide
  source 1..75: mol_type = other RNA

SEQ ID NO: 1105 - RNA, 75 nt, synthetic construct; identical to SEQ ID NO: 1079
  misc_feature 1..75: note = Description of Sequence: Synthetic oligonucleotide
  source 1..75: mol_type = other RNA

SEQ ID NO: 1106 - RNA, 75 nt, synthetic construct; identical to SEQ ID NO: 1079
  misc_feature 1..75: note = Description of Sequence: Synthetic oligonucleotide
  source 1..75: mol_type = other RNA

SEQ ID NO: 1107 - RNA, 75 nt, synthetic construct; identical to SEQ ID NO: 1079
  misc_feature 1..75: note = Description of Sequence: Synthetic oligonucleotide
  source 1..75: mol_type = other RNA

SEQ ID NO: 1108 - RNA, 75 nt, synthetic construct; identical to SEQ ID NO: 1079
  misc_feature 1..75: note = Description of Sequence: Synthetic oligonucleotide
  source 1..75: mol_type = other RNA

SEQ ID NO: 1109 - RNA, 75 nt, synthetic construct; identical to SEQ ID NO: 1079
  misc_feature 1..75: note = Description of Sequence: Synthetic oligonucleotide
  source 1..75: mol_type = other RNA

SEQ ID NO: 1110 - RNA, 75 nt, synthetic construct; identical to SEQ ID NO: 1079
  misc_feature 1..75: note = Description of Sequence: Synthetic oligonucleotide
  source 1..75: mol_type = other RNA

SEQ ID NO: 1111 - RNA, 75 nt, synthetic construct; identical to SEQ ID NO: 1079
  misc_feature 1..75: note = Description of Sequence: Synthetic oligonucleotide
  source 1..75: mol_type = other RNA

SEQ ID NO: 1112 - RNA, 75 nt, synthetic construct; identical to SEQ ID NO: 1079
  misc_feature 1..75: note = Description of Sequence: Synthetic oligonucleotide
  source 1..75: mol_type = other RNA

SEQ ID NO: 1113 - RNA, 75 nt, synthetic construct; identical to SEQ ID NO: 1079
  misc_feature 1..75: note = Description of Sequence: Synthetic oligonucleotide
  source 1..75: mol_type = other RNA

SEQ ID NO: 1114 - RNA, 75 nt, synthetic construct; identical to SEQ ID NO: 1079
  misc_feature 1..75: note = Description of Sequence: Synthetic oligonucleotide
  source 1..75: mol_type = other RNA

SEQ ID NO: 1115 - RNA, 75 nt, synthetic construct; identical to SEQ ID NO: 1079
  misc_feature 1..75: note = Description of Sequence: Synthetic oligonucleotide
  source 1..75: mol_type = other RNA

SEQ ID NO: 1116 - RNA, 75 nt, synthetic construct; identical to SEQ ID NO: 1079
  misc_feature 1..75: note = Description of Sequence: Synthetic oligonucleotide
  source 1..75: mol_type = other RNA

SEQ ID NO: 1117 - RNA, 75 nt, synthetic construct; identical to SEQ ID NO: 1079
  misc_feature 1..75: note = Description of Sequence: Synthetic oligonucleotide
  source 1..75: mol_type = other RNA

SEQ ID NO: 1118 - RNA, 75 nt, synthetic construct; identical to SEQ ID NO: 1079
  misc_feature 1..75: note = Description of Sequence: Synthetic oligonucleotide
  source 1..75: mol_type = other RNA

SEQ ID NO: 1119 - RNA, 75 nt, synthetic construct; identical to SEQ ID NO: 1079
  misc_feature 1..75: note = Description of Sequence: Synthetic oligonucleotide
  source 1..75: mol_type = other RNA

SEQ ID NO: 1120 - RNA, 75 nt, synthetic construct; identical to SEQ ID NO: 1079
  misc_feature 1..75: note = Description of Sequence: Synthetic oligonucleotide
  source 1..75: mol_type = other RNA

SEQ ID NO: 1121 - RNA, 75 nt, synthetic construct; identical to SEQ ID NO: 1079
  misc_feature 1..75: note = Description of Sequence: Synthetic oligonucleotide
  source 1..75: mol_type = other RNA

SEQ ID NO: 1122 - RNA, 75 nt, synthetic construct; identical to SEQ ID NO: 1079
  misc_feature 1..75: note = Description of Sequence: Synthetic oligonucleotide
  source 1..75: mol_type = other RNA

SEQ ID NO: 1123 - RNA, 75 nt, synthetic construct; identical to SEQ ID NO: 1079
  misc_feature 1..75: note = Description of Sequence: Synthetic oligonucleotide
  source 1..75: mol_type = other RNA

SEQ ID NO: 1124 - RNA, 75 nt, synthetic construct; identical to SEQ ID NO: 1079
  misc_feature 1..75: note = Description of Sequence: Synthetic oligonucleotide
  source 1..75: mol_type = other RNA

SEQ ID NO: 1125 - RNA, 75 nt, synthetic construct; identical to SEQ ID NO: 1079
  misc_feature 1..75: note = Description of Sequence: Synthetic oligonucleotide
  source 1..75: mol_type = other RNA

SEQ ID NO: 1126 - RNA, 75 nt, synthetic construct; identical to SEQ ID NO: 1079
  misc_feature 1..75: note = Description of Sequence: Synthetic oligonucleotide
  source 1..75: mol_type = other RNA

SEQ ID NO: 1127 - RNA, 75 nt, synthetic construct; identical to SEQ ID NO: 1079
  misc_feature 1..75: note = Description of Sequence: Synthetic oligonucleotide
  source 1..75: mol_type = other RNA

SEQ ID NO: 1128 - RNA, 75 nt, synthetic construct; identical to SEQ ID NO: 1079
  misc_feature 1..75: note = Description of Sequence: Synthetic oligonucleotide
  source 1..75: mol_type = other RNA

SEQ ID NO: 1129 - RNA, 75 nt, synthetic construct; identical to SEQ ID NO: 1079
  misc_feature 1..75: note = Description of Sequence: Synthetic oligonucleotide
  source 1..75: mol_type = other RNA

SEQ ID NO: 1130 - RNA, 75 nt, synthetic construct; identical to SEQ ID NO: 1079
  misc_feature 1..75: note = Description of Sequence: Synthetic oligonucleotide
  source 1..75: mol_type = other RNA

SEQ ID NO: 1131 - RNA, 75 nt, synthetic construct; identical to SEQ ID NO: 1079
  misc_feature 1..75: note = Description of Sequence: Synthetic oligonucleotide
  source 1..75: mol_type = other RNA

SEQ ID NO: 1132 - RNA, 75 nt, synthetic construct; identical to SEQ ID NO: 1079
  misc_feature 1..75: note = Description of Sequence: Synthetic oligonucleotide
  source 1..75: mol_type = other RNA

SEQ ID NO: 1133 - RNA, 75 nt, synthetic construct; identical to SEQ ID NO: 1079
  misc_feature 1..75: note = Description of Sequence: Synthetic oligonucleotide
  source 1..75: mol_type = other RNA

SEQ ID NO: 1134 - RNA, 75 nt, synthetic construct; identical to SEQ ID NO: 1079
  misc_feature 1..75: note = Description of Sequence: Synthetic oligonucleotide
  source 1..75: mol_type = other RNA

SEQ ID NO: 1135 - RNA, 75 nt, synthetic construct; identical to SEQ ID NO: 1079
  misc_feature 1..75: note = Description of Sequence: Synthetic oligonucleotide
  source 1..75: mol_type = other RNA

SEQ ID NO: 1136 - RNA, 75 nt, synthetic construct; identical to SEQ ID NO: 1079
  misc_feature 1..75: note = Description of Sequence: Synthetic oligonucleotide
  source 1..75: mol_type = other RNA

SEQ ID NO: 1137 - RNA, 75 nt, synthetic construct; identical to SEQ ID NO: 1079
  misc_feature 1..75: note = Description of Sequence: Synthetic oligonucleotide
  source 1..75: mol_type = other RNA

SEQ ID NO: 1138 - RNA, 75 nt, synthetic construct; identical to SEQ ID NO: 1079
  misc_feature 1..75: note = Description of Sequence: Synthetic oligonucleotide
  source 1..75: mol_type = other RNA

SEQ ID NO: 1139 - RNA, 75 nt, synthetic construct; identical to SEQ ID NO: 1079
  misc_feature 1..75: note = Description of Sequence: Synthetic oligonucleotide
  source 1..75: mol_type = other RNA

SEQ ID NO: 1140 - RNA, 75 nt, synthetic construct; identical to SEQ ID NO: 1079
  misc_feature 1..75: note = Description of Sequence: Synthetic oligonucleotide
  source 1..75: mol_type = other RNA

SEQ ID NO: 1141 - RNA, 75 nt, synthetic construct; identical to SEQ ID NO: 1079
  misc_feature 1..75: note = Description of Sequence: Synthetic oligonucleotide
  source 1..75: mol_type = other RNA

SEQ ID NO: 1142 - RNA, 75 nt, synthetic construct; identical to SEQ ID NO: 1079
  misc_feature 1..75: note = Description of Sequence: Synthetic oligonucleotide
  source 1..75: mol_type = other RNA

SEQ ID NO: 1143 - RNA, 75 nt, synthetic construct; identical to SEQ ID NO: 1079
  misc_feature 1..75: note = Description of Sequence: Synthetic oligonucleotide
  source 1..75: mol_type = other RNA

SEQ ID NO: 1144 - RNA, 75 nt, synthetic construct; identical to SEQ ID NO: 1079
  misc_feature 1..75: note = Description of Sequence: Synthetic oligonucleotide
  source 1..75: mol_type = other RNA

SEQ ID NO: 1145 - RNA, 75 nt, synthetic construct; identical to SEQ ID NO: 1079
  misc_feature 1..75: note = Description of Sequence: Synthetic oligonucleotide
  source 1..75: mol_type = other RNA

SEQ ID NO: 1146 - RNA, 75 nt, synthetic construct; identical to SEQ ID NO: 1079
  misc_feature 1..75: note = Description of Sequence: Synthetic oligonucleotide
  source 1..75: mol_type = other RNA

SEQ ID NO: 1147 - RNA, 75 nt, synthetic construct; identical to SEQ ID NO: 1079
  misc_feature 1..75: note = Description of Sequence: Synthetic oligonucleotide
  source 1..75: mol_type = other RNA

SEQ ID NO: 1148 - RNA, 75 nt, synthetic construct; identical to SEQ ID NO: 1079
  misc_feature 1..75: note = Description of Sequence: Synthetic oligonucleotide
  source 1..75: mol_type = other RNA

SEQ ID NO: 1149 - RNA, 75 nt, synthetic construct; identical to SEQ ID NO: 1079
  misc_feature 1..75: note = Description of Sequence: Synthetic oligonucleotide
  source 1..75: mol_type = other RNA

SEQ ID NO: 1150 - RNA, 75 nt, synthetic construct; identical to SEQ ID NO: 1079
  misc_feature 1..75: note = Description of Sequence: Synthetic oligonucleotide
  source 1..75: mol_type = other RNA

SEQ ID NO: 1151 - RNA, 75 nt, synthetic construct; identical to SEQ ID NO: 1079
  misc_feature 1..75: note = Description of Sequence: Synthetic oligonucleotide
  source 1..75: mol_type = other RNA

SEQ ID NO: 1152 - RNA, 75 nt, synthetic construct; identical to SEQ ID NO: 1079
  misc_feature 1..75: note = Description of Sequence: Synthetic oligonucleotide
  source 1..75: mol_type = other RNA

SEQ ID NO: 1153 - RNA, 75 nt, synthetic construct; identical to SEQ ID NO: 1079
  misc_feature 1..75: note = Description of Sequence: Synthetic oligonucleotide
  source 1..75: mol_type = other RNA

SEQ ID NO: 1154 - RNA, 75 nt, synthetic construct; identical to SEQ ID NO: 1079
  misc_feature 1..75: note = Description of Sequence: Synthetic oligonucleotide
  source 1..75: mol_type = other RNA

SEQ ID NO: 1155 - RNA, 73 nt, synthetic construct
  misc_feature 1..73: note = Description of Sequence: Synthetic oligonucleotide
  source 1..73: mol_type = other RNA
ggctccgtggcgcaatggatagcgcattggacttcaaattcaaaggttccgggttcgagtcccggcggagtcg

SEQ ID NO: 1156 - RNA, 76 nt, synthetic construct; identical to SEQ ID NO: 622
  misc_feature 1..76: note = Description of Sequence: Synthetic oligonucleotide
  source 1..76: mol_type = other RNA

SEQ ID NO: 1157 - RNA, 76 nt, synthetic construct; identical to SEQ ID NO: 622
  misc_feature 1..76: note = Description of Sequence: Synthetic oligonucleotide
  source 1..76: mol_type = other RNA

SEQ ID NO: 1158 - RNA, 76 nt, synthetic construct; identical to SEQ ID NO: 622
  misc_feature 1..76: note = Description of Sequence: Synthetic oligonucleotide
  source 1..76: mol_type = other RNA

SEQ ID NO: 1159 - RNA, 76 nt, synthetic construct; identical to SEQ ID NO: 622
  misc_feature 1..76: note = Description of Sequence: Synthetic oligonucleotide
  source 1..76: mol_type = other RNA

SEQ ID NO: 1160 - RNA, 76 nt, synthetic construct; identical to SEQ ID NO: 622
  misc_feature 1..76: note = Description of Sequence: Synthetic oligonucleotide
  source 1..76: mol_type = other RNA

SEQ ID NO: 1161 - RNA, 76 nt, synthetic construct; identical to SEQ ID NO: 622
  misc_feature 1..76: note = Description of Sequence: Synthetic oligonucleotide
  source 1..76: mol_type = other RNA

SEQ ID NO: 1162 - RNA, 76 nt, synthetic construct; identical to SEQ ID NO: 622
  misc_feature 1..76: note = Description of Sequence: Synthetic oligonucleotide
  source 1..76: mol_type = other RNA

SEQ ID NO: 1163 - RNA, 76 nt, synthetic construct; identical to SEQ ID NO: 622
  misc_feature 1..76: note = Description of Sequence: Synthetic oligonucleotide
  source 1..76: mol_type = other RNA

SEQ ID NO: 1164 - RNA, 76 nt, synthetic construct; identical to SEQ ID NO: 622
  misc_feature 1..76: note = Description of Sequence: Synthetic oligonucleotide
  source 1..76: mol_type = other RNA

SEQ ID NO: 1165 - RNA, 76 nt, synthetic construct; identical to SEQ ID NO: 622
  misc_feature 1..76: note = Description of Sequence: Synthetic oligonucleotide
  source 1..76: mol_type = other RNA

SEQ ID NO: 1166 - RNA, 76 nt, synthetic construct; identical to SEQ ID NO: 622
  misc_feature 1..76: note = Description of Sequence: Synthetic oligonucleotide
  source 1..76: mol_type = other RNA

SEQ ID NO: 1167 - RNA, 76 nt, synthetic construct; identical to SEQ ID NO: 622
  misc_feature 1..76: note = Description of Sequence: Synthetic oligonucleotide
  source 1..76: mol_type = other RNA

SEQ ID NO: 1168 - RNA, 76 nt, synthetic construct; identical to SEQ ID NO: 622
  misc_feature 1..76: note = Description of Sequence: Synthetic oligonucleotide
  source 1..76: mol_type = other RNA

SEQ ID NO: 1169 - RNA, 76 nt, synthetic construct; identical to SEQ ID NO: 622
  misc_feature 1..76: note = Description of Sequence: Synthetic oligonucleotide
  source 1..76: mol_type = other RNA

SEQ ID NO: 1170 - RNA, 76 nt, synthetic construct; identical to SEQ ID NO: 622
  misc_feature 1..76: note = Description of Sequence: Synthetic oligonucleotide
  source 1..76: mol_type = other RNA

SEQ ID NO: 1171 - RNA, 76 nt, synthetic construct; identical to SEQ ID NO: 622
  misc_feature 1..76: note = Description of Sequence: Synthetic oligonucleotide
  source 1..76: mol_type = other RNA

SEQ ID NO: 1172 - RNA, 76 nt, synthetic construct; identical to SEQ ID NO: 622
  misc_feature 1..76: note = Description of Sequence: Synthetic oligonucleotide
  source 1..76: mol_type = other RNA

SEQ ID NO: 1173 - RNA, 76 nt, synthetic construct; identical to SEQ ID NO: 622
  misc_feature 1..76: note = Description of Sequence: Synthetic oligonucleotide
  source 1..76: mol_type = other RNA

SEQ ID NO: 1174 - RNA, 76 nt, synthetic construct; identical to SEQ ID NO: 622
  misc_feature 1..76: note = Description of Sequence: Synthetic oligonucleotide
  source 1..76: mol_type = other RNA

SEQ ID NO: 1175 - RNA, 75 nt, synthetic construct
  misc_feature 1..75: note = Description of Sequence: Synthetic oligonucleotide
  source 1..75: mol_type = other RNA
ggctccgtggcgcaatggatagcgcattggacttcaaattcaaaggttccgggttcgagtcccggcggagtcgcc

SEQ ID NO: 1176 - RNA, 74 nt, synthetic construct
  misc_feature 1..74: note = Description of Sequence: Synthetic oligonucleotide
  source 1..74: mol_type = other RNA
ggctccgtggcgcaatggatagcgcattggacttcaaattcaaaggttccgggttcgagtcccggcggagtcgc

SEQ ID NO: 1177 - RNA, 73 nt, synthetic construct; identical to SEQ ID NO: 1155
  misc_feature 1..73: note = Description of Sequence: Synthetic oligonucleotide
  source 1..73: mol_type = other RNA

SEQ ID NO: 1178 - RNA, 73 nt, synthetic construct; identical to SEQ ID NO: 1155
  misc_feature 1..73: note = Description of Sequence: Synthetic oligonucleotide
  source 1..73: mol_type = other RNA

SEQ ID NO: 1179 - RNA, 74 nt, synthetic construct; identical to SEQ ID NO: 1176
  misc_feature 1..74: note = Description of Sequence: Synthetic oligonucleotide
  source 1..74: mol_type = other RNA

SEQ ID NO: 1180 - RNA, 75 nt, synthetic construct; identical to SEQ ID NO: 1175
  misc_feature 1..75: note = Description of Sequence: Synthetic oligonucleotide
  source 1..75: mol_type = other RNA

SEQ ID NO: 1181 - RNA, 76 nt, synthetic construct; identical to SEQ ID NO: 622
  misc_feature 1..76: note = Description of Sequence: Synthetic oligonucleotide
  source 1..76: mol_type = other RNA

SEQ ID NO: 1182 - RNA, 76 nt, synthetic construct; identical to SEQ ID NO: 622
  misc_feature 1..76: note = Description of Sequence: Synthetic oligonucleotide
  source 1..76: mol_type = other RNA

SEQ ID NO: 1183 - RNA, 73 nt, synthetic construct; identical to SEQ ID NO: 1155
  misc_feature 1..73: note = Description of Sequence: Synthetic oligonucleotide
  source 1..73: mol_type = other RNA

SEQ ID NO: 1184 - RNA, 73 nt, synthetic construct; identical to SEQ ID NO: 1155
  misc_feature 1..73: note = Description of Sequence: Synthetic oligonucleotide
  source 1..73: mol_type = other RNA

SEQ ID NO: 1185 - RNA, 73 nt, synthetic construct; identical to SEQ ID NO: 1155
  misc_feature 1..73: note = Description of Sequence: Synthetic oligonucleotide
  source 1..73: mol_type = other RNA

SEQ ID NO: 1186 - RNA, 73 nt, synthetic construct; identical to SEQ ID NO: 1155
  misc_feature 1..73: note = Description of Sequence: Synthetic oligonucleotide
  source 1..73: mol_type = other RNA

SEQ ID NO: 1187 - RNA, 73 nt, synthetic construct; identical to SEQ ID NO: 1155
  misc_feature 1..73: note = Description of Sequence: Synthetic oligonucleotide
  source 1..73: mol_type = other RNA

SEQ ID NO: 1188-1199 - skipped (12 entries)

SEQ ID NO: 1200 - DNA, 73 bp, synthetic construct; identical to SEQ ID NO: 4
  misc_feature 1..73: note = Description of Sequence: Synthetic oligonucleotide
  source 1..73: mol_type = other DNA

SEQ ID NO: 1201 - DNA, 72 bp, synthetic construct; identical to SEQ ID NO: 17
  misc_feature 1..72: note = Description of Sequence: Synthetic oligonucleotide
  source 1..72: mol_type = other DNA

SEQ ID NO: 1202 - DNA, 72 bp, synthetic construct
  misc_feature 1..72: note = Description of Sequence: Synthetic oligonucleotide
  source 1..72: mol_type = other DNA
gggggtgtagctcagtggtagagcgcatgctttgcatgtatgaggccccgggttcgatccccggcacctcca

SEQ ID NO: 1203 - DNA, 73 bp, synthetic construct; identical to SEQ ID NO: 28
  misc_feature 1..73: note = Description of Sequence: Synthetic oligonucleotide
  source 1..73: mol_type = other DNA

SEQ ID NO: 1204 - DNA, 73 bp, synthetic construct; identical to SEQ ID NO: 30
  misc_feature 1..73: note = Description of Sequence: Synthetic oligonucleotide
  source 1..73: mol_type = other DNA

SEQ ID NO: 1205 - DNA, 73 bp, synthetic construct; identical to SEQ ID NO: 32
  misc_feature 1..73: note = Description of Sequence: Synthetic oligonucleotide
  source 1..73: mol_type = other DNA

SEQ ID NO: 1206 - DNA, 73 bp, synthetic construct
  misc_feature 1..73: note = Description of Sequence: Synthetic oligonucleotide
  source 1..73: mol_type = other DNA
gaccgcgtggcctaatggataaggcgtctgacttcggatcagaagattgagggttcgagtccctccgtggtcg

SEQ ID NO: 1207 - DNA, 74 bp, synthetic construct
  misc_feature 1..74: note = Description of Sequence: Synthetic oligonucleotide
  variation 21: note = a, c, t, g, unknown or other
  variation 65: note = a, c, t, g, unknown or other
  source 1..74: mol_type = other DNA
ggctctgtggcgcaatggatnagcgcattggacttctaattcaaaggttgcgggttcgagtcccnccagagtcg

SEQ ID NO: 1208 - DNA, 75 bp, synthetic construct
  misc_feature 1..75: note = Description of Sequence: Synthetic oligonucleotide
  variation 43: note = a, c, t, g, unknown or other
  source 1..75: mol_type = other DNA
gtctctgtggcgcaatcggttagcgcgttcggctgttaaccgnaaaggttggtggttcgagcccacccagggacg

SEQ ID NO: 1209 - DNA, 72 bp, synthetic construct; identical to SEQ ID NO: 62
  misc_feature 1..72: note = Description of Sequence: Synthetic oligonucleotide
  source 1..72: mol_type = other DNA

SEQ ID NO: 1210 - DNA, 73 bp, synthetic construct
  misc_feature 1..73: note = Description of Sequence: Synthetic oligonucleotide
  variation 16: note = a, c, t, g, unknown or other
  source 1..73: mol_type = other DNA
gggggtatagctcagngggtagagcatttgactgcagatcaagaggtccccggttcaaatccgggtgccccct

SEQ ID NO: 1211 - DNA, 72 bp, synthetic construct
  misc_feature 1..72: note = Description of Sequence: Synthetic oligonucleotide
  variation 20: note = a, c, t, g, unknown or other
  source 1..72: mol_type = other DNA
ggttccatggtgtaatggtnagcactctggactctgaatccagcgatccgagttcaagtctcggtggaacct

SEQ ID NO: 1212 - DNA, 72 bp, synthetic construct; identical to SEQ ID NO: 94
  misc_feature 1..72: note = Description of Sequence: Synthetic oligonucleotide
  source 1..72: mol_type = other DNA

SEQ ID NO: 1213 - DNA, 72 bp, synthetic construct; identical to SEQ ID NO: 98
  misc_feature 1..72: note = Description of Sequence: Synthetic oligonucleotide
  source 1..72: mol_type = other DNA

SEQ ID NO: 1214 - DNA, 72 bp, synthetic construct
  misc_feature 1..72: note = Description of Sequence: Synthetic oligonucleotide
  variation 42: note = a, c, t, g, unknown or other
  source 1..72: mol_type = other DNA
tccctggtggtctagtggctaggattcggcgctttcaccgcngcggcccgggttcgattcccggtcagggaa

SEQ ID NO: 1215 - DNA, 71 bp, synthetic construct
  misc_feature 1..71: note = Description of Sequence: Synthetic oligonucleotide
  variation 40: note = a, c, t, g, unknown or other
  source 1..71: mol_type = other DNA
gcattggtggttcagtggtagaattctcgcctcccacgcnggagacccgggttcgattcccggccaatgca

SEQ ID NO: 1216 - DNA, 71 bp, synthetic construct; identical to SEQ ID NO: 108
  misc_feature 1..71: note = Description of Sequence: Synthetic oligonucleotide
  source 1..71: mol_type = other DNA

SEQ ID NO: 1217 - DNA, 72 bp, synthetic construct; identical to SEQ ID NO: 113
  misc_feature 1..72: note = Description of Sequence: Synthetic oligonucleotide
  source 1..72: mol_type = other DNA

SEQ ID NO: 1218 - DNA, 74 bp, synthetic construct; identical to SEQ ID NO: 122
  misc_feature 1..74: note = Description of Sequence: Synthetic oligonucleotide
  source 1..74: mol_type = other DNA

SEQ ID NO: 1219 - DNA, 74 bp, synthetic construct
  misc_feature 1..74: note = Description of Sequence: Synthetic oligonucleotide
  source 1..74: mol_type = other DNA
gctccagtggcgcaatcggttagcgcgcggtacttataatgccgaggttgtgagttcgagcctcacctggagca

SEQ ID NO: 1220 - DNA, 82 bp, synthetic construct; identical to SEQ ID NO: 134
  misc_feature 1..82: note = Description of Sequence: Synthetic oligonucleotide
  source 1..82: mol_type = other DNA

SEQ ID NO: 1221 - DNA, 85 bp, synthetic construct
  misc_feature 1..85: note = Description of Sequence: Synthetic oligonucleotide
  variation 21: note = a, c, t, g, unknown or other
  variation 52: note = a, c, t, g, unknown or other
  source 1..85: mol_type = other DNA
gtcaggatggccgagtggtcntaaggcgccagactcaagttctggtctccgnatggaggcgtgggttcgaatcccacttctgaca

SEQ ID NO: 1222 - DNA, 83 bp, synthetic construct; identical to SEQ ID NO: 144
  misc_feature 1..83: note = Description of Sequence: Synthetic oligonucleotide
  source 1..83: mol_type = other DNA

SEQ ID NO: 1223 - DNA, 83 bp, synthetic construct
  misc_feature 1..83: note = Description of Sequence: Synthetic oligonucleotide
  source 1..83: mol_type = other DNA
accaggatggccgagtggttaaggcgttggacttaagatccaatggacagatgtccgcgtgggttcgaaccccactcctggta

SEQ ID NO: 1224 - DNA, 82 bp, synthetic construct
  misc_feature 1..82: note = Description of Sequence: Synthetic oligonucleotide
  variation 54: note = a, c, t, g, unknown or other
  source 1..82: mol_type = other DNA
ggtagcgtggccgagcggtctaaggcgctggatttaggctccagtctcttcggnggcgtgggttcgaatcccaccgctgcca

SEQ ID NO: 1225 - DNA, 76 bp, synthetic construct
  misc_feature 1..76: note = Description of Sequence: Synthetic oligonucleotide
  variation 74..76: note = a, c, t, g, unknown or other
  source 1..76: mol_type = other DNA
gcccggctagctcagtcggtagagcatgagactcttaatctcagggtcgtgggttcgagccccacgttgggcgnnn

SEQ ID NO: 1226 - DNA, 73 bp, synthetic construct; identical to SEQ ID NO: 167
  misc_feature 1..73: note = Description of Sequence: Synthetic oligonucleotide
  source 1..73: mol_type = other DNA

SEQ ID NO: 1227 - DNA, 73 bp, synthetic construct
  misc_feature 1..73: note = Description of Sequence: Synthetic oligonucleotide
  variation 17: note = a, c, t, g, unknown or other
  source 1..73: mol_type = other DNA
gccctcttagcgcagtnggcagcgcgtcagtctcataatctgaaggtcctgagttcgagcctcagagagggca

SEQ ID NO: 1228 - DNA, 74 bp, synthetic construct
  misc_feature 1..74: note = Description of Sequence: Synthetic oligonucleotide
  variation 41: note = a, c, t, g, unknown or other
  source 1..74: mol_type = other DNA
gccgaaatagctcagttgggagagcgttagactgaagatcntaaaggtccctggttcaatcccgggtttcggca

SEQ ID NO: 1229 - DNA, 72 bp, synthetic construct; identical to SEQ ID NO: 183
  misc_feature 1..72: note = Description of Sequence: Synthetic oligonucleotide
  source 1..72: mol_type = other DNA

SEQ ID NO: 1230 - DNA, 72 bp, synthetic construct; identical to SEQ ID NO: 185
  misc_feature 1..72: note = Description of Sequence: Synthetic oligonucleotide
  source 1..72: mol_type = other DNA

SEQ ID NO: 1231 - DNA, 72 bp, synthetic construct; identical to SEQ ID NO: 189
  misc_feature 1..72: note = Description of Sequence: Synthetic oligonucleotide
  source 1..72: mol_type = other DNA

SEQ ID NO: 1232 - DNA, 82 bp, synthetic construct; identical to SEQ ID NO: 192
  misc_feature 1..82: note = Description of Sequence: Synthetic oligonucleotide
  source 1..82: mol_type = other DNA

SEQ ID NO: 1233 - DNA, 82 bp, synthetic construct; identical to SEQ ID NO: 196
  misc_feature 1..82: note = Description of Sequence: Synthetic oligonucleotide
  source 1..82: mol_type = other DNA

SEQ ID NO: 1234 - DNA, 84 bp, synthetic construct
  misc_feature 1..84: note = Description of Sequence: Synthetic oligonucleotide
  variation 8..9: note = a, c, t, g, unknown or other
  source 1..84: mol_type = other DNA
gacgaggnntggccgagtggttaaggcgatggactgctaatccattgtgctctgcacgcgtgggttcgaatcccatcctcgtcg

SEQ ID NO: 1235 - DNA, 82 bp, synthetic construct
  misc_feature 1..82: note = Description of Sequence: Synthetic oligonucleotide
  source 1..82: mol_type = other DNA
gtagtcgtggccgagtggttaaggcgatggacttgaaatccattggggtctccccgcgcaggttcgaatcctgccggctacg

SEQ ID NO: 1236 - DNA, 74 bp, synthetic construct; identical to SEQ ID NO: 211
  misc_feature 1..74: note = Description of Sequence: Synthetic oligonucleotide
  source 1..74: mol_type = other DNA

SEQ ID NO: 1237 - DNA, 75 bp, synthetic construct
  misc_feature 1..75: note = Description of Sequence: Synthetic oligonucleotide
  variation 4: note = a, c, t, g, unknown or other
  variation 13: note = a, c, t, g, unknown or other
  variation 17: note = a, c, t, g, unknown or other
  variation 20: note = a, c, t, g, unknown or other
  variation 43: note = a, c, t, g, unknown or other
  variation 51: note = a, c, t, g, unknown or other
  variation 67: note = a, c, t, g, unknown or other
  variation 69: note = a, c, t, g, unknown or other
  source 1..75: mol_type = other DNA
ggcnctgtggctnagtnggntaaagcgccggtctcgtaaaccnggagatcntgggttcgaatcccancngggcct

SEQ ID NO: 1238 - DNA, 74 bp, synthetic construct
  misc_feature 1..74: note = Description of Sequence: Synthetic oligonucleotide
  variation 16: note = a, c, t, g, unknown or other
  source 1..74: mol_type = other DNA
ggctccatagctcagngggttagagcactggtcttgtaaaccaggggtcgcgagttcaaatctcgctggggcct

SEQ ID NO: 1239 - DNA, 72 bp, synthetic construct; identical to SEQ ID NO: 229
  misc_feature 1..72: note = Description of Sequence: Synthetic oligonucleotide
  source 1..72: mol_type = other DNA

SEQ ID NO: 1240 - DNA, 73 bp, synthetic construct
  misc_feature 1..73: note = Description of Sequence: Synthetic oligonucleotide
  source 1..73: mol_type = other DNA
ccttcgatagctcagctggtagagcggaggactgtagatccttaggtcgctggttcgattccggctcgaagga

SEQ ID NO: 1241 - DNA, 73 bp, synthetic construct; identical to SEQ ID NO: 246
  misc_feature 1..73: note = Description of Sequence: Synthetic oligonucleotide
  source 1..73: mol_type = other DNA

SEQ ID NO: 1242 - DNA, 73 bp, synthetic construct; identical to SEQ ID NO: 252
  misc_feature 1..73: note = Description of Sequence: Synthetic oligonucleotide
  source 1..73: mol_type = other DNA

SEQ ID NO: 1243 - DNA, 73 bp, synthetic construct; identical to SEQ ID NO: 258
  misc_feature 1..73: note = Description of Sequence: Synthetic oligonucleotide
  source 1..73: mol_type = other DNA

SEQ ID NO: 1244 - DNA, 72 bp, synthetic construct; identical to SEQ ID NO: 262
  misc_feature 1..72: note = Description of Sequence: Synthetic oligonucleotide
  source 1..72: mol_type = other DNA

SEQ ID NO: 1245 - DNA, 76 bp, synthetic construct
  misc_feature 1..76: note = Description of Sequence: Synthetic oligonucleotide
  variation 74..76: note = a, c, t, g, unknown or other
  source 1..76: mol_type = other DNA
ggggaattagctcaagtggtagagcgcttgcttagcatgcaagaggtagtgggatcgatgcccacattctccannn

SEQ ID NO: 1246 - DNA, 75 bp, synthetic construct
  misc_feature 1..75: note = Description of Sequence: Synthetic oligonucleotide
  variation 73..75: note = a, c, t, g, unknown or other
  source 1..75: mol_type = other DNA
ggggatgtagctcagtggtagagcgcatgcttcgcatgtatgaggtcccgggttcgatccccggcatctccannn

SEQ ID NO: 1247 - DNA, 75 bp, synthetic construct
  misc_feature 1..75: note = Description of Sequence: Synthetic oligonucleotide
  variation 73..75: note = a, c, t, g, unknown or other
  source 1..75: mol_type = other DNA
gggggtgtagctcagtggtagagcgcatgctttgcatgtatgaggccccgggttcgatccccggcacctccannn

SEQ ID NO: 1248 - DNA, 76 bp, synthetic construct
  misc_feature 1..76: note = Description of Sequence: Synthetic oligonucleotide
  variation 74..76: note = a, c, t, g, unknown or other
  source 1..76: mol_type = other DNA
gggccagtggcgcaatggataacgcgtctgactacggatcagaagattccaggttcgactcctggctggctcgnnn

SEQ ID NO: 1249 - DNA, 76 bp, synthetic construct
  misc_feature 1..76: note = Description of Sequence: Synthetic oligonucleotide
  variation 74..76: note = a, c, t, g, unknown or other
  source 1..76: mol_type = other DNA
ggccgcgtggcctaatggataaggcgtctgattccggatcagaagattgagggttcgagtcccttcgtggtcgnnn

SEQ ID NO: 1250 - DNA, 76 bp, synthetic construct
  misc_feature 1..76: note = Description of Sequence: Synthetic oligonucleotide
  variation 74..76: note = a, c, t, g, unknown or other
  source 1..76: mol_type = other DNA
gccccagtggcctaatggataaggcactggcctcctaagccagggattgtgggttcgagtcccacctggggtannn

SEQ ID NO: 1251 - DNA, 76 bp, synthetic construct
  misc_feature 1..76: note = Description of Sequence: Synthetic oligonucleotide
  variation 74..76: note = a, c, t, g, unknown or other
  source 1..76: mol_type = other DNA
gaccgcgtggcctaatggataaggcgtctgacttcggatcagaagattgagggttcgagtccctccgtggtcgnnn

SEQ ID NO: 1252 - DNA, 77 bp, synthetic construct
  misc_feature 1..77: note = Description of Sequence: Synthetic oligonucleotide
  variation 21: note = a, c, t, g, unknown or other
  variation 65: note = a, c, t, g, unknown or other
  variation 75..77: note = a, c, t, g, unknown or other
  source 1..77: mol_type = other DNA
ggctctgtggcgcaatggatnagcgcattggacttctaattcaaaggttgcgggttcgagtcccnccagagtcgnnn

SEQ ID NO: 1253 - DNA, 78 bp, synthetic construct
  misc_feature 1..78: note = Description of Sequence: Synthetic oligonucleotide
  variation 43: note = a, c, t, g, unknown or other
  variation 76..78: note = a, c, t, g, unknown or other
  source 1..78: mol_type = other DNA
gtctctgtggcgcaatcggttagcgcgttcggctgttaaccgnaaaggttggtggttcgagcccacccagggacgnnn

SEQ ID NO: 1254 - DNA, 75 bp, synthetic construct
  misc_feature 1..75: note = Description of Sequence: Synthetic oligonucleotide
  variation 73..75: note = a, c, t, g, unknown or other
  source 1..75: mol_type = other DNA
tcctcgttagtatagtggtgagtatccccgcctgtcacgcgggagaccggggttcgattccccgacggggagnnn

SEQ ID NO: 1255 - DNA, 76 bp, synthetic construct
  misc_feature 1..76: note = Description of Sequence: Synthetic oligonucleotide
  variation 16: note = a, c, t, g, unknown or other
  variation 74..76: note = a, c, t, g, unknown or other
  source 1..76: mol_type = other DNA
gggggtatagctcagngggtagagcatttgactgcagatcaagaggtccccggttcaaatccgggtgccccctnnn

SEQ ID NO: 1256 - DNA, 75 bp, synthetic construct
  misc_feature 1..75: note = Description of Sequence: Synthetic oligonucleotide
  variation 20: note = a, c, t, g, unknown or other
  variation 73..75: note = a, c, t, g, unknown or other
  source 1..75: mol_type = other DNA
ggttccatggtgtaatggtnagcactctggactctgaatccagcgatccgagttcaagtctcggtggaacctnnn

SEQ ID NO: 1257 - DNA, 75 bp, synthetic construct
  misc_feature 1..75: note = Description of Sequence: Synthetic oligonucleotide
  variation 73..75: note = a, c, t, g, unknown or other
  source 1..75: mol_type = other DNA
ggtcccatggtgtaatggttagcactctggactttgaatccagcgatccgagttcaaatctcggtgggacctnnn

SEQ ID NO: 1258 - DNA, 75 bp, synthetic construct
  misc_feature 1..75: note = Description of Sequence: Synthetic oligonucleotide
  variation 73..75: note = a, c, t, g, unknown or other
  source 1..75: mol_type = other DNA
tccctggtggtctagtggttaggattcggcgctctcaccgccgcggcccgggttcgattcccggtcagggaannn

SEQ ID NO: 1259 - DNA, 75 bp, synthetic construct
  misc_feature 1..75: note = Description of Sequence: Synthetic oligonucleotide
  variation 42: note = a, c, t, g, unknown or other
  variation 73..75: note = a, c, t, g, unknown or other
  source 1..75: mol_type = other DNA
tccctggtggtctagtggctaggattcggcgctttcaccgcngcggcccgggttcgattcccggtcagggaannn

SEQ ID NO: 1260 - DNA, 74 bp, synthetic construct
  misc_feature 1..74: note = Description of Sequence: Synthetic oligonucleotide
  variation 40: note = a, c, t, g, unknown or other
  variation 72..74: note = a, c, t, g, unknown or other
  source 1..74: mol_type = other DNA
gcattggtggttcagtggtagaattctcgcctcccacgcnggagacccgggttcgattcccggccaatgcannn

SEQ ID NO: 1261 - DNA, 74 bp, synthetic construct
  misc_feature 1..74: note = Description of Sequence: Synthetic oligonucleotide
  variation 72..74: note = a, c, t, g, unknown or other
  source 1..74: mol_type = other DNA
gcattggtggttcagtggtagaattctcgcctgccacgcgggaggcccgggttcgattcccggccaatgcannn

SEQ ID NO: 1262 - DNA, 75 bp, synthetic construct
  misc_feature 1..75: note = Description of Sequence: Synthetic oligonucleotide
  variation 73..75: note = a, c, t, g, unknown or other
  source 1..75: mol_type = other DNA
gcgttggtggtatagtggtgagcatagctgccttccaagcagttgacccgggttcgattcccggccaacgcannn

SEQ ID NO: 1263 - DNA, 77 bp, synthetic construct
  misc_feature 1..77: note = Description of Sequence: Synthetic oligonucleotide
  variation 75..77: note = a, c, t, g, unknown or other
  source 1..77: mol_type = other DNA
ggccggttagctcagttggttagagcgtggtgctaataacgccaaggtcgcgggttcgatccccgtacgggccannn

SEQ ID NO: 1264 - DNA, 77 bp, synthetic construct
  misc_feature 1..77: note = Description of Sequence: Synthetic oligonucleotide
  variation 75..77: note = a, c, t, g, unknown or other
  source 1..77: mol_type = other DNA
gctccagtggcgcaatcggttagcgcgcggtacttataatgccgaggttgtgagttcgagcctcacctggagcannn

SEQ ID NO: 1265 - DNA, 85 bp, synthetic construct
  misc_feature 1..85: note = Description of Sequence: Synthetic oligonucleotide
  variation 83..85: note = a, c, t, g, unknown or other
  source 1..85: mol_type = other DNA
ggtagcgtggccgagcggtctaaggcgctggattaaggctccagtctcttcgggggcgtgggttcgaatcccaccgctgccannn

SEQ ID NO: 1266 - DNA, 88 bp, synthetic construct
  misc_feature 1..88: note = Description of Sequence: Synthetic oligonucleotide
  variation 21: note = a, c, t, g, unknown or other
  variation 52: note = a, c, t, g, unknown or other
  variation 86..88: note = a, c, t, g, unknown or other
  source 1..88: mol_type = other DNA
gtcaggatggccgagtggtcntaaggcgccagactcaagttctggtctccgnatggaggcgtgggttcgaatcccacttctgacannn

SEQ ID NO: 1267 - DNA, 86 bp, synthetic construct
  misc_feature 1..86: note = Description of Sequence: Synthetic oligonucleotide
  variation 84..86: note = a, c, t, g, unknown or other
  source 1..86: mol_type = other DNA
gtcaggatggccgagcggtctaaggcgctgcgttcaggtcgcagtctcccctggaggcgtgggttcgaatcccactcctgacannn

SEQ ID NO: 1268 - DNA, 86 bp, synthetic construct
  misc_feature 1..86: note = Description of Sequence: Synthetic oligonucleotide
  variation 84..86: note = a, c, t, g, unknown or other
  source 1..86: mol_type = other DNA
accaggatggccgagtggttaaggcgttggacttaagatccaatggacagatgtccgcgtgggttcgaaccccactcctggtannn

SEQ ID NO: 1269 - DNA, 85 bp, synthetic construct
  misc_feature 1..85: note = Description of Sequence: Synthetic oligonucleotide
  variation 54: note = a, c, t, g, unknown or other
  variation 83..85: note = a, c, t, g, unknown or other
  source 1..85: mol_type = other DNA
ggtagcgtggccgagcggtctaaggcgctggatttaggctccagtctcttcggnggcgtgggttcgaatcccaccgctgccannn

SEQ ID NO: 1270 - DNA, 79 bp, synthetic construct
  misc_feature 1..79: note = Description of Sequence: Synthetic oligonucleotide
  variation 74..79: note = a, c, t, g, unknown or other
  source 1..79: mol_type = other DNA
gcccggctagctcagtcggtagagcatgagactcttaatctcagggtcgtgggttcgagccccacgttgggcgnnnnnn

SEQ ID NO: 1271 - DNA, 76 bp, synthetic construct
  misc_feature 1..76: note = Description of Sequence: Synthetic oligonucleotide
  variation 74..76: note = a, c, t, g, unknown or other
  source 1..76: mol_type = other DNA
gcctggatagctcagtcggtagagcatcagacttttaatctgagggtccagggttcaagtccctgttcaggcgnnn

SEQ ID NO: 1272 - DNA, 76 bp, synthetic construct
  misc_feature 1..76: note = Description of Sequence: Synthetic oligonucleotide
  variation 17: note = a, c, t, g, unknown or other
  variation 74..76: note = a, c, t, g, unknown or other
  source 1..76: mol_type = other DNA
gccctcttagcgcagtnggcagcgcgtcagtctcataatctgaaggtcctgagttcgagcctcagagagggcannn

SEQ ID NO: 1273 - DNA, 77 bp, synthetic construct
  misc_feature 1..77: note = Description of Sequence: Synthetic oligonucleotide
  variation 41: note = a, c, t, g, unknown or other
  variation 75..77: note = a, c, t, g, unknown or other
  source 1..77: mol_type = other DNA
gccgaaatagctcagttgggagagcgttagactgaagatcntaaaggtccctggttcaatcccgggtttcggcannn

SEQ ID NO: 1274 - DNA, 75 bp, synthetic construct
  misc_feature 1..75: note = Description of Sequence: Synthetic oligonucleotide
  variation 73..75: note = a, c, t, g, unknown or other
  source 1..75: mol_type = other DNA
ggctcgttggtctaggggtatgattctcgcttaggatgcgagaggtcccgggttcaaatcccggacgagcccnnn

SEQ ID NO: 1275 - DNA, 75 bp, synthetic construct
  misc_feature 1..75: note = Description of Sequence: Synthetic oligonucleotide
  variation 73..75: note = a, c, t, g, unknown or other
  source 1..75: mol_type = other DNA
ggctcgttggtctaggggtatgattctcgcttcgggtgcgagaggtcccgggttcaaatcccggacgagcccnnn

SEQ ID NO: 1276 - DNA, 75 bp, synthetic construct
  misc_feature 1..75: note = Description of Sequence: Synthetic oligonucleotide
  variation 73..75: note = a, c, t, g, unknown or other
  source 1..75: mol_type = other DNA
ggctcgttggtctaggggtatgattctcgctttgggtgcgagaggtcccgggttcaaatcccggacgagcccnnn

SEQ ID NO: 1277 - DNA, 85 bp, synthetic construct
  misc_feature 1..85: note = Description of Sequence: Synthetic oligonucleotide
  variation 83..85: note = a, c, t, g, unknown or other
  source 1..85: mol_type = other DNA
gtagtcgtggccgagtggttaaggcgatggactagaaatccattggggtttccccgcgcaggttcgaatcctgccgactacgnnn

SEQ ID NO: 1278 - DNA, 85 bp, synthetic construct
  misc_feature 1..85: note = Description of Sequence: Synthetic oligonucleotide
  variation 83..85: note = a, c, t, g, unknown or other
  source 1..85: mol_type = other DNA
gctgtgatggccgagtggttaaggcgttggactcgaaatccaatggggtctccccgcgcaggttcgaatcctgctcacagcgnnn

SEQ ID NO: 1279 - DNA, 87 bp, synthetic construct
  misc_feature 1..87: note = Description of Sequence: Synthetic oligonucleotide
  variation 8..9: note = a, c, t, g, unknown or other
  variation 85..87: note = a, c, t, g, unknown or other
  source 1..87: mol_type = other DNA
gacgaggnntggccgagtggttaaggcgatggactgctaatccattgtgctctgcacgcgtgggttcgaatcccatcctcgtcgnnn

SEQ ID NO: 1280 - DNA, 85 bp, synthetic construct
  misc_feature 1..85: note = Description of Sequence: Synthetic oligonucleotide
  variation 83..85: note = a, c, t, g, unknown or other
  source 1..85: mol_type = other DNA
gtagtcgtggccgagtggttaaggcgatggacttgaaatccattggggtctccccgcgcaggttcgaatcctgccggctacgnnn

SEQ ID NO: 1281 - DNA, 77 bp, synthetic construct
  misc_feature 1..77: note = Description of Sequence: Synthetic oligonucleotide
  variation 75..77: note = a, c, t, g, unknown or other
  source 1..77: mol_type = other DNA
ggctccgtggcttagctggttaaagcgcctgtctagtaaacaggagatcctgggttcgaatcccagcggggcctnnn

SEQ ID NO: 1282 - DNA, 78 bp, synthetic construct
  misc_feature 1..78: note = Description of Sequence: Synthetic oligonucleotide
  variation 4: note = a, c, t, g, unknown or other
  variation 13: note = a, c, t, g, unknown or other
  variation 17: note = a, c, t, g, unknown or other
  variation 20: note = a, c, t, g, unknown or other
  variation 43: note = a, c, t, g, unknown or other
  variation 51: note = a, c, t, g, unknown or other
  variation 67: note = a, c, t, g, unknown or other
  variation 69: note = a, c, t, g, unknown or other
  variation 76..78: note = a, c, t, g, unknown or other
  source 1..78: mol_type = other DNA
ggcnctgtggctnagtnggntaaagcgccggtctcgtaaaccnggagatcntgggttcgaatcccancngggcctnnn

SEQ ID NO: 1283 - DNA, 77 bp, synthetic construct
  misc_feature 1..77: note = Description of Sequence: Synthetic oligonucleotide
  variation 16: note = a, c, t, g, unknown or other
  variation 75..77: note = a, c, t, g, unknown or other
  source 1..77: mol_type = other DNA
ggctccatagctcagngggttagagcactggtcttgtaaaccaggggtcgcgagttcaaatctcgctggggcctnnn

SEQ ID NO: 1284 - DNA, 75 bp, synthetic construct
  misc_feature 1..75: note = Description of Sequence: Synthetic oligonucleotide
  variation 73..75: note = a, c, t, g, unknown or other
  source 1..75: mol_type = other DNA
gacctcgtggcgcaacggtagcgcgtctgactccagatcagaaggttgcgtgttcaaatcacgtcggggtcannn

SEQ ID NO: 1285 - DNA, 76 bp, synthetic construct
  misc_feature 1..76: note = Description of Sequence: Synthetic oligonucleotide
  variation 74..76: note = a, c, t, g, unknown or other
  source 1..76: mol_type = other DNA
ccttcgatagctcagctggtagagcggaggactgtagatccttaggtcgctggttcgattccggctcgaaggannn

SEQ ID NO: 1286 - DNA, 76 bp, synthetic construct
  misc_feature 1..76: note = Description of Sequence: Synthetic oligonucleotide
  variation 74..76: note = a, c, t, g, unknown or other
  source 1..76: mol_type = other DNA
gtttccgtagtgtagtggttatcacgttcgcctaacacgcgaaaggtccccggttcgaaaccgggcggaaacannn

SEQ ID NO: 1287 - DNA, 76 bp, synthetic construct
  misc_feature 1..76: note = Description of Sequence: Synthetic oligonucleotide
  variation 74..76: note = a, c, t, g, unknown or other
  source 1..76: mol_type = other DNA
gtttccgtagtgtagtggttatcacgttcgcctcacacgcgaaaggtccccggttcgaaaccgggcggaaacannn

SEQ ID NO: 1288 - DNA, 76 bp, synthetic construct
  misc_feature 1..76: note = Description of Sequence: Synthetic oligonucleotide
  variation 74..76: note = a, c, t, g, unknown or other
  source 1..76: mol_type = other DNA
ggttccatagtgtagtggttatcacgtctgctttacacgcagaaggtcctgggttcgagccccagtggaaccannn

SEQ ID NO: 1289 - DNA, 75 bp, synthetic construct
  misc_feature 1..75: note = Description of Sequence: Synthetic oligonucleotide
  variation 73..75: note = a, c, t, g, unknown or other
  source 1..75: mol_type = other DNA
agcagagtggcgcagcggaagcgtgctgggcccataacccagaggtcgatggatcgaaaccatcctctgctannn

SEQ ID NO: 1290 - RNA, 73 nt, synthetic construct
  misc_feature 1..73: note = Description of Sequence: Synthetic oligonucleotide
  source 1..73: mol_type = other RNA
ggctccgtggcgcaatggatagcgcattggacttctaattcaaaggttccgggttcgagtcccggcggagtcg

SEQ ID NO: 1291 - RNA, 75 nt, synthetic construct
  modified_base 13: mod_base = p
  misc_feature 1..75: note = Description of Sequence: Synthetic oligonucleotide
  misc_feature 1..75: note = Description of Combined DNA/RNA Molecule: Synthetic oligonucleotide
  source 1..75: mol_type = other RNA
ggttccatggtgnaatggtaagcactctggactctgaatccagcgatccgagttcgagtctcggtggaacctcca

SEQ ID NO: 1292 - RNA, 72 nt, synthetic construct
  misc_feature 1..72: note = Description of Sequence: Synthetic oligonucleotide
  source 1..72: mol_type = other RNA
ggctcgttggtctaggggtatgattctcgcttagggtgcgagaggtcccgggttcaaatcccggacgagccc

SEQ ID NO: 1293 - RNA, 72 nt, synthetic construct
  misc_feature 1..72: note = Description of sequence: Synthetic oligonucleotide
  source 1..72: mol_type = other RNA
ggggatgtagctcagtggtagagcgcatgctttgcatgtatgaggtcccgggttcgatccccggcatctcca